(19) United States
(12) Patent Application Publication
(10) Pub. No.: US 2023/0123669 A1
(43) Pub. Date: Apr. 20, 2023

(54) BASE EDITOR PREDICTIVE ALGORITHM AND METHOD OF USE

(71) Applicants: The Broad Institute, Inc., Cambridge, MA (US); President and Fellows of Harvard College, Cambridge, MA (US); Massachusetts Institute of Technology, Cambridge, MA (US); The Brigham and Women's Hospital, Inc., Boston, MA (US)

(72) Inventors: David R. Liu, Cambridge, MA (US); Mandana Arbab, Cambridge, MA (US); Max Walt Shen, Cambridge, MA (US); Christopher Cassa, Boston, MA (US)

(73) Assignees: The Broad Institute, Inc., Cambridge, MA (US); President and Fellows of Harvard College, Cambridge, MA (US); Massachusetts Institute of Technology, Cambridge, MA (US); The Brigham and Woman's Hospital, Inc., Boston, MA (US)

(21) Appl. No.: 17/797,697

(22) PCT Filed: Feb. 5, 2021
(86) PCT No.: PCT/US2021/016924

§ 371 Date: Aug. 4, 2022

Related U.S. Application Data
(60) Provisional application No. 63/038,691, filed on Jun. 12, 2020.
(60) Provisional application No. 62/970,684, filed on Feb. 5, 2020.

(51) Int. Cl. G16B 40/00; G16B 20/50; C12N 15/11

(52) U.S. Cl. CPC G16B 40/00; G16B 20/50; C12N 15/11

(57) ABSTRACT

The present disclosure provides a novel machine learning model capable of assisting those of ordinary skill in the art to conduct base editing by, inter alia, facilitating the selection of an appropriate guide RNA and base editor combination which are capable of conducting base editing at a certain level of efficiency and specificity on a given input target DNA sequence desired to be edited to produce an outcome genotype of interest. The disclosure also provides base editors (e.g., ABEs and CBEs), napDNAbps, cytidine deaminases, adenosine deaminases, nucleic acid sequences encoding base editors and components thereof, vectors, and cells. In addition, the disclosure provides methods of making biological or experimental training and/or validation data for training and/or validating the machine learning computational models, as well as, vectors, libraries, and nucleic acid sequences for use in obtaining said experimental training and/or validation data.

### RELATED APPLICATIONS

[0001] This PCT application claims the benefit under 35 U.S.C. § 119(e) of U.S. Provisional Application No. 62/970,684, filed Feb. 5, 2020, and to U.S. Provisional Application No. 63/038,691, filed Jun. 12, 2020. The entire contents of each of the above-indicated applications are incorporated herein by reference in their entireties.

### GOVERNMENT SUPPORT

[0002] This invention was made with government support under AI142756, HG009490, EB022376, GM118062, HG010372, and HG010391 awarded by the National Institutes of Health; and HR0011-17-2-0049, awarded by the Defense Advanced Research Projects Agency. The government has certain rights in the invention.

### BACKGROUND OF THE INVENTION

[0003] Programmable editing of single nucleotides in genomic DNA is a key capability for both research and therapeutic applications (Adli, 2018; Anzalone et al., 2019; Doench et al., 2016; Doudna and Knott, 2018; Pérez-Palma et al., 2019; Rees and Liu, 2018; Shen et al., 2018). Single-nucleotide variants (SNVs) represent approximately half of known pathogenic alleles (Landrum et al., 2016; Stenson et al., 2014), and thus targeted installation of point mutations can facilitate the study or potential treatment of genetic disorders. Previously, cytosine deaminases were developed, and laboratory-evolved adenine deaminase enzymes fused to catalytically impaired CRISPR-Cas proteins to enable cytosine and adenine base editing in living cells in a programmable fashion without requiring a DNA double-strand break or a donor DNA template (Gaudelli et al., 2017; Gehrke et al., 2018; Huang et al., 2019; Komor et al., 2016; Nishida et al., 2016; Thuronyi et al., 2019; Yeh et al., 2018). Cytosine base editors (CBEs) and adenine base editors (ABEs) together enable all four transition point mutations (C→T, T→C, A→G, and G→A) and routinely achieve high ratios of desired sequence substitutions relative to undesired insertions and deletions (indels) (Lin et al., 2014; Paquet et al., 2016). Base editing has been applied in a wide range of organisms ranging from bacteria to plants to primates (Rees and Liu, 2018), and has already been used to correct pathogenic mutations in animal models, in some cases with phenotypic rescue (Chadwick et al., 2017; Liang et al., 2017; Min et al., 2019; Ryu et al., 2018; Song et al., 2019; Villiger et al., 2018; Yeh et al., 2018; Zeng et al., 2018), establishing its potential for clinical applications.

[0004] The utility of base editing has inspired the development of many cytosine and adenine base editor variants with distinct editing properties (Adli, 2018; Molla and Yang, 2019; Rees and Liu, 2018). To date, these properties have been gleaned by analyzing base editing outcomes at a modest number of genomic sites, often chosen to align with previous genome editing studies (Gaudelli et al., 2017; Gehrke et al., 2018; Huang et al., 2019; Komor et al., 2016; Thuronyi et al., 2019). The interplay between base editor and target sequence, however, influences base editing outcomes in complex and occasionally unintuitive ways (Gehrke et al., 2018; Huang et al., 2019; Tan et al., 2019; Thuronyi et al., 2019; Villiger et al., 2018). As a result, obtaining a desired genotype with useful efficiencies often requires empirical optimization of base editor and single guide RNA (sgRNA) choice for each target. Likewise, some viable targets that do not fit canonical guidelines for base editing use may be overlooked since simple guidelines for target selection likely do not fully capture the scope of base editing.

[0005] A predictive tool that facilitates the selection of appropriate base editors and/or guide RNAs to achieve any given desired genotype outcome for a given target site through base editing would be a significant advancement in the art.

### SUMMARY OF THE INVENTION

[0006] The inventors have determined that base editing outcomes are highly dependent on both the particular base editor and the target sequence context and cannot be reliably predicted from the target locus and known base editor characteristics by simple inspection. The abundance of base editors designed for the same basic task complicates selection of the optimal tool for precision editing at a locus of interest. Through a comprehensive and systematic analysis of sequence and base editor determinants of base editing outcomes as described herein (e.g., in the Examples), the inventors have built of a suite of machine learning models for predicting genome outcomes in base editing, and for facilitating the selection of appropriate base conditions (e.g., the particular base editor employed and guide RNA used) for any given genomic locus and desired genotype outcome.

[0007] Accordingly, the present disclosure provides novel machine learning models capable of assisting those of ordinary skill in the art to conduct base editing by, inter alia, facilitating the selection of an appropriate guide RNA and base editor combination which are capable of conducting base editing at a certain level of efficiency and specificity on a given input target DNA sequence desired to be edited to produce an outcome genotype of interest. The novel machine learning algorithm described and claimed herein can be referred to as “BE-Hive.” The disclosure further provides a graphical user interface that implements BE-Hive, allowing a user to input various features, including a desired target DNA sequence, an appropriate guide RNA (or associated CRISPR protospacer), a base editor, and a cell in which base editing is to take place, and to predict base editing efficiencies and bystander editing patterns for the selected features.

[0008] The disclosure provides systematic and comprehensive predictive tools (e.g., one or more machine learning models) that facilitate the selection of appropriate base editors and/or guide RNAs to achieve any given desired predicted genotype outcome for a given target site through base editing. In another aspect, the predictive tools (e.g., machine learning models) disclosed herein may also be used to discover or identify previously unknown base editor properties (e.g., previously unknown preferences, such as a base editor's preference to make a transversion edit instead of a transition edit), which may facilitate the design of novel base editors with new capabilities. In various aspects, the herein disclosed machine learning models for selecting base editing components (e.g., selecting an appropriate base editor and/or a guide RNA) to achieve a desired genotype outcome may involve the consideration of one or more determinants of base editing, which can include, but are not limited to, the choice of the napDNAbp of the base editing system; the choice of the deaminase of the base editing system; the choice of base editor; the target nucleotide sequence (e.g., guide RNA binding sites); the target genomic location; the transcriptional state of the target genomic location; locus-dependent activity of the choice napDNAbp; cell-type; transcriptional state of DNA repair proteins; and base editor modifications.

[0009] The disclosure also provides machine learning models for predicting genotype outcomes based on one or more inputs, such as a base editor and/or other determinants of base editing, which include, but are not limited to, the choice of the napDNAbp of the base editing system; the choice of the deaminase of the base editing system; the choice of base editor; the target nucleotide sequence (e.g., guide RNA binding sites); the target genomic location; the transcriptional state of the target genomic location; locus-dependent activity of the choice napDNAbp; cell-type; transcriptional state of DNA repair proteins; and base editor modifications.

[0010] In addition, the disclosure provides methods of training the machine learning models used herein to be able to predict desired genotype outcomes based on one or more inputs, such as a base editor and/or other determinants of base editing, which include, but are not limited to, the choice of the napDNAbp of the base editing system; the choice of the deaminase of the base editing system; the choice of base editor; the target nucleotide sequence (e.g., guide RNA binding sites); the target genomic location; the transcriptional state of the target genomic location; locus-dependent activity of the choice napDNAbp; cell-type; transcriptional state of DNA repair proteins; and base editor modifications.

[0011] In certain other aspects, the disclosure provides training methods for the herein disclosed machine learning models. In certain aspects, the training methods comprises obtaining training data for training the machine learning models. The training data, in some aspects, may comprising sequencing information generated from a plurality of base editing reactions conducted in cells comprising a base editor, a guide RNA, and an editing target, wherein sequencing the DNA in the edited cells produces sequencing data that may be analyzed to identify the nucleotide edits made for a particular base editor.

[0012] The disclosure further provides base editors (e.g., ABEs and CBEs), napDNAbps, cytidine deaminases, adenosine deaminases, guide RNAs, nucleic acid sequences encoding base editors and components thereof, nucleic acid sequences encoding guide RNAs, vectors that encode base editors and/or guide RNAs and/or target sites of interest, training libraries comprising a plurality of vectors for generating sequencing data of actual genotype outcomes of base editing reactions for use in training the computation models described herein, and cells comprising said vectors and training libraries, all of which may be used in connection with the machine learning models described herein to predict desired genotype outcomes of a target site of interest.

[0013] In one aspect, the disclosure provides a method of using at least one machine learning model to identify a guide RNA for use in a base editing system for introducing a target change into a nucleotide sequence, the base editing system comprising a napDNAbp and a deaminase, the method comprising: using software executing on at least one computer hardware processor to perform: obtaining input data indicative of the nucleotide sequence and a set of one or more guide RNAs; generating first input features from the input data; applying a first machine learning model to the first input features to obtain first output data indicative, for each one guide RNA in the set of guide RNAs, of a base editing efficiency, at one or multiple locations in the nucleotide sequence, of the base editing system when using the each one guide RNA; generating second input features from the input data; applying a second machine learning model to the second input features to obtain second output data indicative, for each one guide RNA in the set of guide RNAs, of bystander editing activity, at one or multiple locations in the nucleotide sequence, by the base editing system when using the each one guide RNA; and identifying, using the first output data and the second output data, the guide RNA for use in the base editing system for introducing the target change into the nucleotide sequence.

[0014] In certain embodiments, the first machine learning model comprises a non-linear machine learning model selected from the group consisting of a random forest model, a logistic regression model, a support vector machine model, a generalized linear model, a hierarchical Bayesian model, and neural network model. In other embodiments, the first machine learning model can comprise a random forest model.

[0015] The set of guide RNAs can include a first guide RNA, and wherein generating the first input features comprises generating multiple features to include in the first input features, the multiple features including: features encoding at least some nucleotides in a protospacer sequence or spacer sequence associated with the first guide RNA; and features encoding at least some nucleotides, in the nucleotide sequence, located within a threshold number of nucleotides of the protospacer sequence associated with the first guide RNA.

[0016] In various embodiments, the multiple features further include one or more of the following features: features encoding at least some dinucleotides at neighboring positions in the protospacer sequence; features representing melting temperature of the first guide RNA; one or more features representing a total number of G, C, A, and/or T nucleotides in the protospacer sequence; and a feature representing an average base editing efficiency of the base editing system.

[0017] In certain embodiments, the set of guide RNAs includes a first guide RNA, wherein the first output data is indicative of a fraction of sequence reads containing at least one base edit at any nucleotide in a target window about a protospacer sequence associated with the first guide RNA, among all sequence reads.

[0018] In other embodiments, the second first machine learning model comprises a non-linear machine learning model selected from the group consisting of a random forest model, a logistic regression model, a support vector machine model, a generalized linear model, a hierarchical Bayesian model, and neural network model. In yet other embodiments, the second machine learning model comprises a deep neural network model. The neural network model can comprise a conditional autoregressive neural network model. The conditional autoregressive neural network model can include: an encoder neural network mapping input data to a latent representation; and a decoder neural network mapping the latent representation to output data, wherein the decoder neural network has an autoregressive structure. The encoder neural network can comprise a multi-layer fully connected network with residual connections. The decoder neural network can generate a distribution over base editing outcomes at each nucleotide while conditioning on previously-generated outcomes. The neural network model can include parameters representing a position-wise bias toward producing an unedited outcome.

[0019] The set of guide RNAs can include a first guide RNA, and wherein generating the second input features can comprise generating multiple features to include in the second input features, the multiple features including: features encoding at least some nucleotides in a protospacer sequence or spacer sequence associated with the first guide RNA; and features encoding at least some nucleotides, in the nucleotide sequence, located within a threshold number of nucleotides of the protospacer sequence associated with the first guide RNA.

[0020] In other embodiments, the second output data can be indicative of frequencies of occurrence of base editing outcomes each of which includes edits to nucleotides at multiple positions. The second output data can be indicative of a frequency distribution on combinations of base editing outcomes.

[0021] In various embodiments, the set of guide RNAs can include a first guide RNA, wherein, for a specific combination of base edits, the second output data is indicative of a frequency of occurrence of the specific combination of base edits among all sequenced reads containing at least one base edit at any nucleotide in a target window about a protospacer sequence associated with the first guide RNA.

[0022] In other embodiments, the set of guide RNAs can include a first guide RNA, wherein the first output data includes a first base editing efficiency value for the first guide RNA, wherein the second output data includes a first bystander editing value for the first guide RNA, and wherein identifying the guide RNA using the first output data and the second output data, comprises multiplying the first base editing efficiency value by the first bystander editing value.

[0023] In certain embodiments, the first machine learning model comprises a first plurality of values for a respective first plurality of parameters, the first plurality of values used by the at least one computer hardware processor to obtain the first output data from the first input features. The first plurality of parameters can comprise at least one thousand parameters. The first plurality of parameters can comprise between one thousand and ten thousand parameters.

[0024] In various embodiments, the first machine learning model can comprise a random forest model comprising at least 100 decision trees, each of the at least 100 decision trees having at least a depth of D, and wherein processing the input data using the random forest model comprises performing 100*D comparisons. The random forest model can comprise at least 500 decision trees. In certain embodiments, depth of D can be greater than or equal to five, wherein processing the input data using the random forest model comprises performing at least 2500 comparisons.

[0025] In other embodiments, the second machine learning model can comprise a second plurality of values for a respective second plurality of parameters, the second plurality of values used by the at least one computer hardware processor to obtain the second output data from the second input features. The second plurality of parameters can comprise at least ten thousand parameters, or between 25,000 and 100,000 parameters, or between 30,000 and 40,000 parameters.

[0026] In other embodiments, the disclosure provides a method of manufacturing the identified guide RNA for use in the base editing system for introducing the target change into the nucleotide sequence.

[0027] In other aspects, the disclosure provides a method for training the first machine learning model of any of the above aspects comprising: (i) preparing a library comprising a plurality of nucleic acid molecules each encoding a nucleotide target sequence and a cognate guide RNA; (ii) introducing the library into a plurality of host cells; (iii) contacting the library in the host cells with a Cas-based genome editing system to produce a plurality of genomic repair products; (iv) determining the sequences of the genomic repair products; and (v) training the first machine learning model with training data that comprises at least the sequences of the genomic repair products and the cognate guide RNA.

[0028] In still other embodiments, the disclosure provides a method for training the second machine learning model of any of the above aspects comprising: (i) preparing a library comprising a plurality of nucleic acid molecules each encoding a nucleotide target sequence and a cognate guide RNA; (ii) introducing the library into a plurality of host cells; (iii) contacting the library in the host cells with a Cas-based genome editing system to produce a plurality of genomic repair products; (iv) determining the sequences of the genomic repair products; and (v) training the second machine learning model with training data that comprises at least the sequences of the genomic repair products and the cognate guide RNA.

[0029] The disclosure also provides for a computer readable storage medium storing processor executable instructions that, when executed by at least one computer hardware processor, cause the at least one computer hardware processor to perform a method of using at least one machine learning model to identify a guide RNA for use in a base editing system for introducing a target change into a nucleotide sequence, the base editing system comprising a napDNAbp and a deaminase, the method comprising: obtaining input data indicative of the nucleotide sequence and a set of one or more guide RNAs; generating first input features from the input data; applying a first machine learning model to the first input features to obtain first output data indicative, for each one guide RNA in the set of guide RNAs, of a base editing efficiency, at one or multiple locations in the nucleotide sequence, of the base editing system when using the each one guide RNA; generating second input features from the input data; applying a second machine learning model to the second input features to obtain second output data indicative, for each one guide RNA in the set of guide RNAs, of bystander editing activity, at one or multiple locations in the nucleotide sequence, by the base editing system when using the each one guide RNA; and identifying, using the first output data and the second output data, the guide RNA for use in the base editing system for introducing the target change into the nucleotide sequence.

[0030] In another aspect, the disclosure provides a system comprising: at least one computer hardware processor; and at least one computer readable storage medium storing processor executable instructions that, when executed by the at least one computer hardware processor, cause the at least one computer hardware processor to perform a method of using at least one machine learning model to identify a guide RNA for use in a base editing system for introducing a target change into a nucleotide sequence, the base editing system comprising a napDNAbp and a deaminase, the method comprising: obtaining input data indicative of the nucleotide sequence and a set of one or more guide RNAs; generating first input features from the input data; applying a first machine learning model to the first input features to obtain first output data indicative, for each one guide RNA in the set of guide RNAs, of a base editing efficiency, at one or multiple locations in the nucleotide sequence, of the base editing system when using the each one guide RNA; generating second input features from the input data; applying a second machine learning model to the second input features to obtain second output data indicative, for each one guide RNA in the set of guide RNAs, of bystander editing activity, at one or multiple locations in the nucleotide sequence, by the base editing system when using the each one guide RNA; and identifying, using the first output data and the second output data, the guide RNA for use in the base editing system for introducing the target change into the nucleotide sequence.

[0031] In other aspects, the disclosure provides a method, comprising: using software executing on at least one computer hardware processor to perform: receiving input data indicative of a selection of: a nucleotide sequence; a base editing system comprising a napDNAbp and a deaminase; and a first guide RNA; applying a first machine learning model to the first input features, generated from the input data, to obtain first output data indicative of a base editing efficiency, at a target location in the nucleotide sequence, of the base editing system when using the first guide RNA; applying a second machine learning model to the second input features, generated from the input data, to obtain second output data indicative of bystander editing activity, at one or multiple locations in the nucleotide sequence, by the base editing system when using the first guide RNA; and determining, using the first output data and the second output data, a likelihood of whether the first guide RNA and the base editing system, when used in combination, will result in introduce a target change to the nucleotide sequence in a cell.

[0032] The disclosure also provides at least one computer-readable storage medium storing processor-executable instructions that, when executed by at least one computer hardware processor, cause the at least one computer processor to perform: receiving input data indicative of a selection of: a nucleotide sequence; a base editing system comprising a napDNAbp and a deaminase; and a first guide RNA; applying a first machine learning model to the first input features, generated from the input data, to obtain first output data indicative of a base editing efficiency, at a target location in the nucleotide sequence, of the base editing system when using the first guide RNA; applying a second machine learning model to the second input features, generated from the input data, to obtain second output data indicative of bystander editing activity, at one or multiple locations in the nucleotide sequence, by the base editing system when using the first guide RNA; and determining, using the first output data and the second output data, a likelihood of whether the first guide RNA and the base editing system, when used in combination, will result in introduce a target change to the nucleotide sequence in a cell.

[0033] In other aspects, the disclosure provides a system, comprising: at least one computer hardware processor; and at least one computer-readable storage medium storing processor-executable instructions that, when executed by the at least one computer hardware processor, cause the at least one computer processor to perform: receiving input data indicative of a selection of: a nucleotide sequence; a base editing system comprising a napDNAbp and a deaminase; and a first guide RNA; applying a first machine learning model to the first input features, generated from the input data, to obtain first output data indicative of a base editing efficiency, at a target location in the nucleotide sequence, of the base editing system when using the first guide RNA; applying a second machine learning model to the second input features, generated from the input data, to obtain second output data indicative of bystander editing activity, at one or multiple locations in the nucleotide sequence, by the base editing system when using the first guide RNA; and determining, using the first output data and the second output data, a likelihood of whether the first guide RNA and the base editing system, when used in combination, will result in introduce a target change to the nucleotide sequence in a cell.

[0034] In one aspect, the present disclosure provides a machine learning algorithm capable of assisting those of ordinary skill in the art to conduct base editing by, inter alia, facilitating the selection of an appropriate guide RNA and base editor combination which are capable of conducting base editing at a certain level of efficiency and specificity on a given input target DNA sequence desired to be edited to produce an outcome genotype of interest. The machine learning algorithm considers various inputs, including the sequence of the target DNA sequence to be edited, the napDNAbp options, the deaminase options, the guide RNA options, the spacer and/or protospacer sequence associated with the RNA options, dinucleotide composition at neighboring positions in the protospacers, guide RNA melting temperatures, and the total number of G, C, A, and/or T nucleotides in the protospacer sequence, among other features. In addition, other features that may be considered as input to the machine learning algorithm. Such features may include, but are not limited to, the transcriptional state of the target genomic location, cell-type in which the base editing is taking place, transcriptional state of the target DNA being edited, and any epigenetic modifications of the target DNA being edited.

[0035] In other aspects, the machine learning model can include or be based solely on a base editing efficiency machine learning model, for example, a method identifying a guide RNA for use in a base editing system for introducing a target change into a nucleotide sequence, the base editing system comprising a napDNAbp and a deaminase, the method comprising: using software executing on at least one computer hardware processor to perform: obtaining input data indicative of the nucleotide sequence and a set of one or more guide RNAs; generating first input features from the input data; applying a first machine learning model to the first input features to obtain first output data indicative, for each one guide RNA in the set of guide RNAs, of a base editing efficiency, at one or multiple locations in the nucleotide sequence, of the base editing system when using the each one guide RNA; and identifying, using the first output data, the guide RNA for use in the base editing system for introducing the target change into the nucleotide sequence.

[0036] Nevertheless, in such aspects, the machine learning model can further comprise a bystander model, comprising generating second input features from the input data; applying a second machine learning model to the second input features to obtain second output data indicative, for each one guide RNA in the set of guide RNAs, of bystander editing activity, at one or multiple locations in the nucleotide sequence, by the base editing system when using the each one guide RNA, wherein identifying the guide RNA is performed using the first output data and the second output data.

[0037] The disclosure also provides at least one computer readable storage medium storing processor executable instructions that, when executed by at least one computer hardware processor, cause the at least one computer hardware processor to perform a method of identifying a guide RNA for use in a base editing system for introducing a target change into a nucleotide sequence, the base editing system comprising a napDNAbp and a deaminase, the method comprising: obtaining input data indicative of the nucleotide sequence and a set of one or more guide RNAs; generating first input features from the input data; applying a first machine learning model to the first input features to obtain first output data indicative, for each one guide RNA in the set of guide RNAs, of a base editing efficiency, at one or multiple locations in the nucleotide sequence, of the base editing system when using the each one guide RNA; and identifying, using the first output data, the guide RNA for use in the base editing system for introducing the target change into the nucleotide sequence.

[0038] In other aspects, the disclosure provides a system, comprising: at least one computer hardware processor; and at least one computer readable storage medium storing processor executable instructions that, when executed by the at least one computer hardware processor, cause the at least one computer hardware processor to perform a method of identifying a guide RNA for use in a base editing system for introducing a target change into a nucleotide sequence, the base editing system comprising a napDNAbp and a deaminase, the method comprising: obtaining input data indicative of the nucleotide sequence and a set of one or more guide RNAs; generating first input features from the input data; applying a first machine learning model to the first input features to obtain first output data indicative, for each one guide RNA in the set of guide RNAs, of a base editing efficiency, at one or multiple locations in the nucleotide sequence, of the base editing system when using the each one guide RNA; and identifying, using the first output data, the guide RNA for use in the base editing system for introducing the target change into the nucleotide sequence.

[0039] Thus, in various aspects, the machine learning model can include or be based solely on a bystander machine learning model, comprising a method of identifying a guide RNA for use in a base editing system for introducing a target change into a nucleotide sequence, the base editing system comprising a napDNAbp and a deaminase, the method comprising: using software executing on at least one computer hardware processor to perform: obtaining input data indicative of the nucleotide sequence and a set of one or more guide RNAs; generating first input features from the input data; applying a first machine learning model to the first input features to obtain first output data indicative, for each one guide RNA in the set of guide RNAs, of bystander editing activity, at one or multiple locations in the nucleotide sequence, by the base editing system when using the each one guide RNA; and identifying, using the first output data, the guide RNA for use in the base editing system for introducing the target change into the nucleotide sequence.

[0040] Such a method may further comprise an efficiency machine learning model, comprising generating second input features from the input data; applying a second machine learning model to the second input features to obtain second output data indicative, for each one guide RNA in the set of guide RNAs, of a base editing efficiency, at one or multiple locations in the nucleotide sequence, of the base editing system when using the each one guide RNA, wherein identifying the guide RNA is performed using the first output data and the second output data.

[0041] In other aspects, the disclosure provides at least one computer readable storage medium storing processor executable instructions that, when executed by at least one computer hardware processor, cause the at least one computer hardware processor to perform a method of identifying a guide RNA for use in a base editing system for introducing a target change into a nucleotide sequence, the base editing system comprising a napDNAbp and a deaminase, the method comprising: obtaining input data indicative of the nucleotide sequence and a set of one or more guide RNAs; generating first input features from the input data; applying a first machine learning model to the first input features to obtain first output data indicative, for each one guide RNA in the set of guide RNAs, of bystander editing activity, at one or multiple locations in the nucleotide sequence, by the base editing system when using the each one guide RNA; and identifying, using the first output data, the guide RNA for use in the base editing system for introducing the target change into the nucleotide sequence.

[0042] In still other aspects, the disclosure provides a system, comprising: at least one computer hardware processor; and at least one computer readable storage medium storing processor executable instructions that, when executed by at least one computer hardware processor, cause the at least one computer hardware processor to perform a method of identifying a guide RNA for use in a base editing system for introducing a target change into a nucleotide sequence, the base editing system comprising a napDNAbp and a deaminase, the method comprising: obtaining input data indicative of the nucleotide sequence and a set of one or more guide RNAs; generating first input features from the input data; applying a first machine learning model to the first input features to obtain first output data indicative, for each one guide RNA in the set of guide RNAs, of bystander editing activity, at one or multiple locations in the nucleotide sequence, by the base editing system when using the each one guide RNA; and identifying, using the first output data, the guide RNA for use in the base editing system for introducing the target change into the nucleotide sequence.

[0043] The novel machine learning algorithm described and claimed herein can be referred to as “BE-Hive.” The disclosure further provides a graphical user interface that implements BE-Hive, allowing a user to input various features, including a desired target DNA sequence, an appropriate guide RNA (or associated CRISPR protospacer), a base editor, and a cell in which base editing is to take place, and to predict base editing efficiencies and bystander editing patterns for the selected features.

[0044] Accordingly, the present disclosure provides a novel machine learning algorithm capable of assisting those of ordinary skill in the art to conduct base editing by, inter alia, facilitating the selection of an appropriate guide RNA and base editor combination which are capable of conducting base editing at a certain level of efficiency and specificity on a given input target DNA sequence desired to be edited to produce an outcome genotype of interest. The novel machine learning algorithm described and claimed herein can be referred to as “BE-Hive.” The disclosure further provides a graphical user interface that implements BE-Hive, allowing a user to input various features, including a desired target DNA sequence, an appropriate guide RNA (or associated CRISPR protospacer), a base editor, and a cell in which base editing is to take place, and to predict base editing efficiencies and bystander editing patterns for the selected features.

[0045] It should be appreciated that the foregoing concepts, and additional concepts discussed below, may be arranged in any suitable combination, as the present disclosure is not limited in this respect. Further, other advantages and novel features of the present disclosure will become apparent from the following detailed description of various non-limiting embodiments when considered in conjunction with the accompanying Figures.

### BRIEF DESCRIPTION OF THE DRAWINGS

[0046] The following Figures form part of the present specification and are included to further demonstrate certain aspects of the present disclosure, which can be better understood by reference to one or more of these drawings in combination with the detailed description of specific embodiments presented herein.

[0047] FIGS. 1A-1I show the systematic characterization of base editing activity at thousands of target sites. FIG. 1A provides an overview of genome-integrated target library assay. Pairs of thousands of sgRNAs and corresponding target sites are integrated into mammalian cells and treated with base editors. Edited cells are enriched by antibiotic selection, and library cassettes are amplified for high-throughput sequencing. FIGS. 1B-1I show base editor activity profiles. Values reflect editing efficiencies of the outcomes specified at the bottom of each heat map, normalized to a maximum of 100, at the protospacer positions shown at each row. Column 3 (C to T) indicates canonical base editing activity (C to T for CBEs and A to G for ABEs), Columns 1-2 indicate other mutation activity at the canonical substrate nucleotide (C for CBEs and A for ABEs), and Columns 4-5 indicates other rare mutations. In the first Column from the left, positions with values ≥50% of maximum are outlined in a box and ≥30% of maximum are shaded.

[0048] FIGS. 2A-2I show sequence motifs for base editing outcomes and characterization of indels. FIGS. 2A-2F show sequence motifs for various base editing activities from logistic regression models. The sign of each learned weight indicates a contribution above (positive sign) or below (negative sign) the mean activity. Logo opacity is proportional to the motif's Pearson's R or AUC on held-out sequence contexts. FIG. 2G shows base editing:indel ratio distributions. The table lists geometric mean and interquartile range (IQR). FIG. 2H is a heat map of indel frequencies among edited reads by position and length. Frequencies are normalized (divided) by indel length. FIG. 2I is a heat map of insertion frequencies among all insertions by insert length and number of repeats.

[0049] FIGS. 3A-3G show models of base editing efficiency and outcomes. FIG. 3A shows a decision tree for base editing experiment design. To achieve a goal phenotype, such as correcting a pathogenic SNV, a user may enumerate all possible genomic edits, base editors, and sgRNAs that may induce the goal phenotype, and may prioritize these choices with assistance from models that predict base editing efficiency and the frequency of bystander editing patterns that induce the desired phenotype. FIG. 3B shows a model design for predicting base editing efficiency. The input target sequence is featurized and provided to gradient-boosted regression trees which predict a base editing efficiency z-score with an approximately normal distribution centered at 0 with standard deviation 1. Optionally, the user can calibrate the predicted z-score into a predicted fraction of sequenced reads with base editing activity by providing a small amount of data from the user's experimental system. FIG. 3C provides a comparison of predicted versus observed base editing efficiencies at held-out target sites. FIG. 3D shows the design of a deep conditional autoregressive model, a general approach for learning bystander base editing patterns from experimental data. Given a target sequence, sgRNA, base editor, and cell-type, the model generates a combination of editing outcomes at all substrate nucleotides in the target sequence from a probability distribution learned from data. To generate this combination of editing outcomes, the model performs a single generative step per substrate nucleotide, wherein the model generates a predicted editing outcome using the local sequence context around the substrate nucleotide and all previously generated editing outcomes. Once the model has been trained, the model can be queried with any combination of editing outcomes to obtain a predicted frequency among edited reads. FIG. 3E shows the bystander editing model performance at N≥614 held-out target sites. FIG. 3F provides a comparison of predicted versus observed disequilibrium scores, which reflect the tendency of substrate nucleotide pairs to be edited together or separately. Disequilibrium scores equal the predicted or observed probability of both substrate nucleotides edited divided by the probability under the assumption of independent editing events. FIG. 3G shows a diagram of the interactive web application for BE-Hive, which predicts the frequency of bystander editing patterns in the DNA sequence (top) or translated amino acid sequence (bottom). The interactive web application also predicts base editing efficiency.

[0050] FIGS. 4A-4H show precise base editing correction of pathogenic alleles. FIG. 4A provides a comparison of predicted versus observed correction precision of disease-related SNVs in mES cells. Trend line depicts rolling mean and standard deviation. FIGS. 4B-4H show the observed frequency of correcting disease-related SNVs to their wild-type genotype among edited reads among varying groups of disease-related SNVs. FIG. 4B shows disease-related SNVs with at least two substrate nucleotides, or any number of substrate nucleotides, in the editing window of each base editor. Error bars depict standard error of the mean. Distribution plot depicts the protospacer positions of SNVs. FIG. 4C shows disease-related SNVs with bystander nucleotides in the editing window of each base editor. FIG. 4D shows disease-related SNVs positioned at C6 with no other bystander nucleotides in the editing window and edited by BE4 in mES cells. FIGS. 4E-4F show disease-related SNVs edited by BE4 (FIG. 4E) and ABE (FIG. 4F). For each subfigure, targets have identical positions of the disease-related SNV and bystander substrate nucleotides in protospacer positions 2-10. Scatter plots compare predicted to observed correction precisions. B=C, G, or T; and D=A, G, or T. FIGS. 4G-4H show disease-related SNVs edited by various base editors. For each subfigure, targets have identical positions of the disease-related SNV and bystander substrate nucleotides in protospacer positions 2-10. Scatter plots compare observed to predicted correction precisions. D=A, G, or T.

[0051] FIGS. 5A-5F show sequence determinants of CBE-mediated transversions. FIG. 5A shows sequence motifs for the purity of C editing to A, G, and T. Logo opacity is proportional to the motif's Pearson's R or AUC on held-out sequence contexts. FIG. 5B provides a comparison of average cytosine transversion product purity in mES cells at minimally biased targets versus targets predicted by BE-Hive to be enriched for transversion edits. Error bars depict the standard error of the mean. FIG. 5C shows the relationship between BE:indel ratio and cytosine transversion purity in mES cells. Trend line depicts rolling mean and standard deviation. FIG. 5D shows the relationship between correction precision among edited genotypes and edited amino acid sequences in mES cells. FIG. 5E shows the observed correction precision of disease-related transversion SNVs among edited DNA (lower curve) or edited amino acid sequences (upper curve) in mES cells. FIG. 5F provides a comparison of predicted vs observed correction precision of disease-related transversion mutations by cytosine base editing among edited DNA (left) or edited amino acid sequences (right) in mES cells. Trend lines and shading show the rolling mean and standard deviation, respectively.

[0052] FIGS. 6A-6F show that mutations to conserved APOBEC residues increase cytosine transversion purity. FIG. 6A is an evolutionary tree of adenine and cytosine deaminase families. FIG. 6B shows the structural alignment of AID, A3A and homology model of the APOBEC1 deaminase domains by the Theseus software package. Amino acids structurally homologous to T27 or S38 in AID are marked with arrows. FIG. 6C provides a comparison of average transversion purity by eA3A-BE4 and mutant variants and target sequence groups. Error bars show the standard error of the mean. FIG. 6D provides a comparison of average editing efficiency between eA3A-BE4 and mutant variants. Error bars depict standard error of the mean. FIG. 6E shows the observed correction precision of disease-related transversion SNVs among edited DNA (lower curve) or edited amino acid sequences (upper curve) in mES cells. FIG. 6F provides a comparison of predicted versus observed correction precision of disease-related transversion mutations by cytosine base editing among edited DNA (left) or edited amino acid sequences (right) in mES cells. Trend lines and shading show the rolling mean and standard deviation, respectively.

[0053] FIGS. 7A-7I show that mutations to conserved APOBEC residues increase CBE product purity. FIGS. 7A-7H show the characterization of EA-BE4 compared to BE4 (FIGS. 7A-7C) and eA3A-BE5 compared to eA3A-BE4 (FIGS. 7D-7F). FIG. 7A and FIG. 7E provide a comparison of transversion frequency by base editor variants with mutations at conserved deaminase residues in BE4 and eA3A-BE4. Error bars depict standard error of the mean. In FIG. 7A, * P<0.02; ** P=2.0×10⁻⁶, N=3,636 and 1,208 substrate nucleotides. 95% CI: 18-35% reduction. In FIG. 7D, * P<0.07; ** P=2.5×10⁵, Welch's T-test, N=1,837 and 685 substrate nucleotides. 95% CI: 17-36% reduction. Welch's T-test was used for each significance test. FIG. 7B and FIG. 7F show base editor mutation activity profiles in HEK293T cells. Values are mean editing efficiencies normalized to a maximum of 100. Protospacer positions with values ≥50% of maximum are outlined and ≥30% of maximum are shaded. FIG. 7C and FIG. 7G show sequence motifs for base editing efficiency in HEK293T cells. FIG. 7D and FIG. 7H provide a comparison of base editing efficiency between BE4 and the EA-BE4 variant, and between eA3A-BE4 and eA3A-BE5. Error bars depict the standard error of the mean. FIG. 7I shows a Pareto frontier depicting the empirical tradeoff between average cytosine transversion purity and editing window size by base editor. Scatter plot densities show bootstrap samples of the mean. Single-nucleotide base editing precision was simulated by choosing the substrate nucleotide closest to the position with maximum base editing efficiency as the target substrate for each base editor. Distribution plot depicts the protospacer position of target nucleotides used in the simulated precision task.

[0054] FIGS. 8A-8H show that a genome-integrated library assay is replicable and consistent with endogenous data. FIGS. 8A-8B show average base editing efficiencies by experimental conditions. FIG. 8C shows the consistency of base editing outcome frequencies between biological replicates of the library assay at matched target sites. FIG. 8D shows the consistency of base editing outcome frequencies between data from the library assay versus data from endogenous sites at matched sgRNA-target pairs. FIGS. 8E-8H show base editor mutation activity profiles in HEK293T cells. Values are normalized to a maximum of 100. In the first Column from left, protospacer positions with values ≥50% of maximum are outlined and ≥30% of maximum are shaded.

[0055] FIGS. 9A-9L show base editor activity profiles. FIGS. 9A-9L show base editor activity profiles in HEK293T (FIGS. 9A-9D) and U2OS (FIGS. 9E-9L) cells. Values are normalized to a maximum of 100. In the first Column from left, positions with values ≥50% of maximum are outlined and ≥30% of maximum are shaded.

[0056] FIGS. 10A-10C show base editing efficiency sequence motifs. FIGS. 10A-10B show sequence motifs for base editing efficiency from logistic regression models. Logo opacity is proportional to the motif's Pearson's R or AUC on held-out sequence contexts. FIG. 10C is a heat map representation of sequence motifs for cytosine base editing efficiency from logistic regression models. Rows depict individual experimental replicates across cell-types and base editors.

[0057] FIGS. 11A-11E show the characterization of rare base editing outcomes. FIG. 11A is a heat map representation of sequence motifs for cytosine transversion purity from logistic regression models. Rows depict individual experimental replicates across cell-types and base editors. FIG. 11B shows a fraction of 1-bp indels among all indels, represented by box plots depicting median and interquartile range for various groups of data. Library gold standard conditions were manually defined. FIG. 11C shows a frequency of 1-bp indels by protospacer position. Gold standard conditions have a bimodal distribution peaking at positions 6 and 18, while other library conditions are similar to untreated library conditions with a mostly uniform distribution. FIG. 11D shows the learned parameters from two-way ANOVA performed for adjusting batch effects in observed BE:indel ratios, grouped by cell-type. Horizontal lines indicate the geometric mean. FIG. 11E shows a table of BE:indel ratio statistics with and without 1-bp indel adjustment.

[0058] FIGS. 12A-12I show the characterization of base editing indels and modeling of editing outcomes, FIG. 12A is a heat map of indel frequencies among edited reads by position and length. Frequencies are normalized (divided) by indel length. FIG. 12B is a heat map of insertion frequencies among all insertions by insertion length and repeat length. FIG. 12C shows sequence motifs for BE:indel ratios from logistic regression models. Logo opacity is proportional to the motif's Pearson's R or AUC on held-out sequence contexts. Positive logo weights are correlated with higher BE:indel ratios and therefore a lower indel frequency relative to base editing activity. FIG. 12D provides a comparison of BE:indel ratios between experimental replicates of the library assay at matched target sites in mES cells. FIG. 12E shows sequence motifs for base editing efficiency from logistic regression models. Logo opacity is proportional to the motif's Pearson's R or AUC on held-out sequence contexts. Positive logo weights are correlated with higher BE:indel ratios and therefore a lower indel frequency relative to base editing activity. FIGS. 12F-12G show the performance of the gradient-boosted regression tree model at predicting base editing efficiency. Each dot represents a distinct random splitting of data into training and test sets. FIG. 12F shows the performance by training vs test set for each base editor in mES and HEK293T cells. FIG. 12G shows the performance by fraction of training set used, with and without hyperparameter optimization, in mES cells. Trend line is from a lowess model which performs locally weighted linear regression. Trend line was manually extended to “100% with hyperparameter optimization”. FIGS. 12H-12I show the performance of the deep conditional autoregressive model at predicting bystander editing patterns. Each dot represents a distinct random splitting of data into training and test sets. FIG. 12H shows the performance by training versus test set for each base editor in mES and HEK293T cells. FIG. 12I shows the performance by fraction of training set used. Trend line is from a lowess model which performs locally weighted linear regression.

[0059] FIGS. 13A-13G show bystander editing model performance. FIG. 13A shows the performance of the deep conditional autoregressive model at predicting bystander editing patterns by the number of substrate nucleotides in protospacer positions 1-12 across all base editors in mES cells. FIG. 13B shows the consistency of observed bystander editing patterns between experimental library replicates at matched target sites by the number of substrate nucleotides in protospacer positions 1-12 across all base editors in mES cells. FIG. 13C shows the observed disequilibrium scores between pairs of substrate nucleotides by the nucleotide distance in mES cells. Disequilibrium scores equal the predicted or observed probability of both substrate nucleotides edited divided by the probability under the assumption of independent editing events. FIG. 13D shows the comparison between observed disequilibrium scores and predicted disequilibrium scores from the deep conditional autoregressive model in mES cells. FIG. 13E shows a comparison of predicted versus observed correction precision of disease-related SNVs in mES cells. Trend line depicts rolling mean and standard deviation. FIGS. 13F-13G show a comparison of predicted versus observed correction precision of disease-related SNVs in HEK293T cells. Trend line depicts rolling mean and standard deviation.

[0060] FIGS. 14A-14E show editing outcomes on the transversion-enriched SNV library. FIG. 14A shows the consistency of bystander editing patterns between 35-nt and 61-nt matched target sites by eA3A-BE4 in mES cells. FIG. 14B is a table showing the observed base editing purity of C to A among edited reads by eA3A-BE4 at synthetically optimized target sites in mES cells. FIG. 14C shows sequence motifs for the purity of cytosine editing to adenine, guanine, and thymine by eA3A-BE4, T31A from logistic regression models. Logo opacity is proportional to the motif's Pearson's R or AUC on held-out sequence contexts. Positive logo weights are correlated with higher BE:indel ratios and therefore a lower indel frequency relative to base editing activity. FIG. 14D shows base editing to indel ratio distributions comparing BE4 to EA-BE4. FIG. 14E shows base editing to indel ratio distributions comparing eA3A-BE4 to eA3A-BE5.

[0061] FIG. 15 shows adenine base editing at 12,000 sequences in a library context in mESCs.

[0062] FIGS. 16A-16C show base editing activity profiles.

[0063] FIG. 17 shows base editing preference motifs.

[0064] FIG. 18 shows adenine base editing of the SMN2 disease causing SNV in SMA mESCs. Editors denoted below x-axis with PAM sequence in parentheses, and protospacer position of the target nucleotide assuming a 20nt protospacer where the PAM is at position 21-23.

[0065] FIG. 19 shows a gel electrophoresis image of SMN cDNA PCR amplification spanning exon 6 to exon 8, depicting bands that include or that have skipped exon 7 in pre-mRNA splicing in SMA mESCs treated with the indicated ABE8-fusion base editors.

[0066] FIG. 20 is a graph showing bodyweight in grams of ASO and AAV+ASO treated animals compared to wild type controls (ASO n=3, AAV+ASO n=3, WT n=8).

[0067] FIG. 21 is a survival curve of ASO (mean survival 22 days) and AAV+ASO treated animals compared to wild type controls. At time of writing (Jan. 15, 2019) a single AAV treated mouse is still alive at p40.

[0068] FIG. 22 shows the time to right after inversion measured in seconds, with a maximum of 30 seconds. Datapoints are averaged across 3 measurements per animal.

[0069] FIGS. 23A-23C show open field tests tracing voluntary movement path of wild type (FIGS. 23A-23B) and AAV+ASO treated mutant (FIG. 23C) mice, measured over 20 minutes in light cycle.

[0070] FIG. 24A-J provides a series of images (screen shots) of a graphical user interface (GUI) implementation of the machine learning algorithm described herein and referred to as “BE-Hive” and which utilizes only the base editing efficiency machine learning model, as described herein.

[0071] The GUI and underlying algorithm accessed by the GUI assists one of ordinary skill in the art to conduct base editing on a context target sequence of interest. In particular, the embodiment of BE-Hive of FIG. 24A-J utilizes only the base editing efficiency machine learning model. FIG. 24A provides an exemplary context sequence of 100 nucleotides (shown in the 5′-to-3′ direction) and having the sequence GAGTCCTAG AGTGTTATCTTTAGGCACGATACAGGTACATGAATCCGCTCATCTAGGTGACCTA CTCCTGCCCTGGTAGCAGCCTTAATGACGATCGTTG (SEQ ID NO: 3213). The underlined “C” designates a hypothetical T-to-C mutation at position 27, which is desired to be converted back to a T through base editing to eliminate the mutation.

[0072] Using a web browser, a user navigates to www.crisprbehive.design and selects “single mode,” as an example of other modes. As shown in FIG. 24B, the user first enters the exemplary context sequence (SEQ ID NO: 3213) into the cell identified as “Target genomic DNA.” The software then populates a set of possible CRISPR protospacers which run along the length of the context sequence as a 20-nt window, beginning at each successive nucleotide position from the 5′-to-3′ direction. FIG. 24C displays the populated set of possible CRISPR protospacers that are generated from the context sequence input as drop-down menu format. The drop-down menu format allows the user to select any specific one protospacer as an input to performing the BE-Hive algorithm. Next, as shown in FIG. 24D and FIG. 24E, the user may also select from a second drop down menu a combination of base editor and cell type. The combination of groups that may be selected are: (1) ABE+mES cells; (2) ABE-CP1041+mES cells; (3) BE4+mES cells; (4) BE4-CP1028+mES cells; (5) AID+mES cells; (6) CDA+mES cells; (7) eA3A+mES cells; (8) evoAPOBEC+mES cells; (9) ABE+HEK293T cells; (10) ABE-CP1041+HEK293T cells; (11) BE4+HEK293T cells; (12) BE4-CP1028+HEK293T cells; (13) AID+HEK293T cells; (14) CDA+HEK293T cells; (15) eA3A+HEK293T cells; (16) evoAPOBEC+HEK293T cells; (17) eA3A-T44DS45A+HEK293T cells; (18) EA-BE4+HEK293T cells; (19) eA3A-T31A+mES cells; (20) eA3A-T31AT44A+mES cells; and (21) EA-BE4+mES cells.

[0073] The amino acid sequences of each of the base editor options are provided herein in the Detailed Description. FIG. 24F shows the results for a CRISPR protospacer of GCACGATACAGGTACATGAA (SEQ ID NO: 3214), a base editor of BE4-CP1028, and cell type of mES. The results show the predicted outcomes (ranked as percent efficiencies) of various genotype changes to the target genomic DNA that are possible for the selected combination of the guide RNA (i.e, the protospacer) and the base editor, as predicted by BE-Hive. Thus, in this example, the desired edit of the “C” at position 27 to a “T”, without any bystander changes, only has a predicted efficiency of 7.7%. However, as seen in FIG. 24D, choosing the BE4 base editor in mES cells is predicted to make the desired edit of the “C” at position 27 to a “T” with a 54.5% efficiency. Thus, in this instance, a user would be more inclined—which the particular protospacer choice—to select using the BE4 editor, rather than BE4-CP1028 circular permutant variant.

[0074] FIG. 24G permits the user to also input the amino acid frame, which then leads to the prediction by BE-Hive (as shown in FIG. 24H) of base editing outcomes among edited amino acid coding reads present in the context sequence. Thus, with the selection of the BE4-CP1028 editor, a change of a C-to-T at position 27 is predicted to produce a stop codon with a 30.3% efficiency (based on the sum of the individual efficiencies of those genotype outcomes that include said conversion). FIG. 24I is merely a magnified version of the edited amino acid reads. FIG. 24J is the resulting output of the BE-Hive predictions in table form based on the selected inputs.

[0075] FIGS. 25A-E provides a series of images (screen shots) of a graphical user interface (GUI) implementation of the machine learning algorithm described and claimed herein and referred to as “BE-Hive” and which utilizes both the base editing efficiency machine learning model and the bystander efficiency machine learning model, as described herein. The GUI and underlying algorithm accessed by the GUI assists one of ordinary skill in the art to conduct base editing on a context target sequence of interest.

[0076] FIG. 25A provides an exemplary context sequence of 100 nucleotides (shown in the 5′-to-3′ direction) and having the sequence GAGTCCTAG AGTGTTATCTTTAGGCACGATACAGGTACATGAATCCGCTCATCTAGGTGACCTA CTCCTGCCCTGGTAGCAGCCTTAATGACGATCGTTG (SEQ ID NO: 3213). The underlined “C” designates a hypothetical T-to-C mutation at position 27, which is desired to be converted back to a T through base editing to eliminate the mutation. Using a web browser, a user navigates to www.crisprbehive.design and selects “batch mode.”

[0077] As shown in FIG. 25B, the user first enters the exemplary context sequence (SEQ ID NO: 3213) into the cell identified as “Target genomic DNA.” The software then populates a set of possible CRISPR protospacers which run along the length of the context sequence as a 20-nt window, beginning at each successive nucleotide position from the 5′-to-3′ direction. FIG. 25C displays the populated set of possible CRISPR protospacers that are generated from the context sequence input as drop-down menu format. The drop-down menu format allows the user to select any specific one protospacer as an input to performing the BE-Hive algorithm.

[0078] Next, as shown in FIG. 25D, the user may also select from a second drop-down menu a combination of base editor and cell type. The combination of groups that may be selected are grouped into four categories: (1) adenine base editors in mES cells; (2) cytosine base editors in mES cells; (3) adenine base editors in HEK293T cells; and (4) cytosine base editors in HEK293T cells.

[0079] Once selected, the BE-Hive algorithm processes the inputs (the selected protospacer and the selected base editor/cell type) and displays the output in the form of a table entitled “Base editing outcomes among sequenced reads: DNA sequence.” This table displays the selected protospacer at the top row and the Target genomic DNA sequence in the second row from the top. The protospacer is aligned over its corresponding position in the Target genomic DNA sequence. The remaining rows each display a corresponding genotype outcome, and shows with yellow highlighting those nucleotide changes that would result by base editing with said inputs. At the rightmost side are two columns, each displaying the percentage of efficiency of introducing the designated edit in yellow highlighting, wherein each column provides the efficiency data for each of the available base editors in the selected category. For example, in the selected category of “Adenine BEs, mES)” in the drop-down menu, the output columns of base editors include, from left to right, ABE and ABE CP1041.

[0080] In the selected category of “Cytosine BEs, mES” in the drop-down menu, the output columns of base editors include, from left to right, BE4, BE4 CP1028, AID, CDA, eA3A, evoA, eA3A T31A, eA3A T31A T44A, and EA-BE4 (as shown in FIG. 25D). In addition, as shown in FIG. 25D, for each genotype outcome, the percent efficiency for each specific base editor is shown. To demonstrate, for the first genotype outcome-which makes the desired C-to-T conversion at position 27 of the Target genomic DNA—the base editor, BE4, has a predicted efficiency of 19%. By contrast, AID only has a predicted efficiency of 3%. And, the eA3A T31A and eA3A T31AT44A editors each have a higher predicted efficiency of 68% and 65%, respectively.

[0081] In addition, as shown in FIG. 25E, the user may also focus the prediction of the algorithm on predicting the efficiency of producing certain amino acid residue outcomes within each of the six possible reading frames along the length of the Target genomic DNA. For example, the first row of amino acid sequence showing a Met (“M”) in place of the Thr (“T”) in the starting amino acid sequence (top row) represents the first possible modified amino acid sequence outcome. This outcome is associated with two different possible genotype outcomes, including one which converts the target C to a T at position 27 of the Target genomic DNA. The columns at the right most side provide the predicted efficiency of converting a Thr (“T”) to an Met (“M”) the indicate position for each of the listed base editors (in this case, the cytosine base editors).

[0082] FIG. 26 provides a schematic that represents the use of BE-Hive to facilitate base editing.

### DEFINITIONS

[0083] As used herein and in the claims, the singular forms “a,” “an,” and “the” include the singular and the plural reference unless the context clearly indicates otherwise. Thus, for example, a reference to “an agent” includes a single agent and a plurality of such agents.

### AAV

[0084] An “adeno-associated virus” or “AAV” is a virus which infects humans and some other primate species. The wild-type AAV genome is a single-stranded deoxyribonucleic acid (ssDNA), either positive- or negative-sensed. The genome comprises two inverted terminal repeats (ITRs), one at each end of the DNA strand, and two open reading frames (ORFs): rep and cap between the ITRs. The rep ORF comprises four overlapping genes encoding Rep proteins required for the AAV life cycle. The cap ORF comprises overlapping genes encoding capsid proteins: VP1, VP2 and VP3, which interact together to form the viral capsid. VP1, VP2 and VP3 are translated from one mRNA transcript, which can be spliced in two different manners: either a longer or shorter intron can be excised resulting in the formation of two isoforms of mRNAs: a ˜2.3 kb- and a ˜2.6 kb-long mRNA isoform. The capsid forms a supramolecular assembly of approximately 60 individual capsid protein subunits into a non-enveloped, T-1 icosahedral lattice capable of protecting the AAV genome. The mature capsid is composed of VP1, VP2, and VP3 (molecular masses of approximately 87, 73, and 62 kDa respectively) in a ratio of about 1:1:10.

[0085] rAAV particles may comprise a nucleic acid vector (e.g., a recombinant genome), which may comprise at a minimum: (a) one or more heterologous nucleic acid regions comprising a sequence encoding a protein or polypeptide of interest (e.g., a split Cas9 or split nucleobase) or an RNA of interest (e.g., a gRNA), or one or more nucleic acid regions comprising a sequence encoding a Rep protein; and (b) one or more regions comprising inverted terminal repeat (ITR) sequences (e.g., wild-type ITR sequences or engineered ITR sequences) flanking the one or more nucleic acid regions (e.g., heterologous nucleic acid regions). In some embodiments, the nucleic acid vector is between 4 kb and 5 kb in size (e.g., 4.2 to 4.7 kb in size). In some embodiments, the nucleic acid vector further comprises a region encoding a Rep protein. In some embodiments, the nucleic acid vector is circular. In some embodiments, the nucleic acid vector is single-stranded. In some embodiments, the nucleic acid vector is double-stranded. In some embodiments, a double-stranded nucleic acid vector may be, for example, a self-complimentary vector that contains a region of the nucleic acid vector that is complementary to another region of the nucleic acid vector, initiating the formation of the double-strandedness of the nucleic acid vector.

### Adenosine Deaminase (or Adenine Deaminase)

[0086] As used herein, the term “adenosine deaminase” or “adenosine deaminase domain” refers to a protein or enzyme that catalyzes a deamination reaction of an adenosine (or adenine). The terms “adenosine” and “adenine” are used interchangeably for purposes of the present disclosure. For example, for purposes of the disclosure, reference to an “adenine base editor” (ABE) refers to the same entity as an “adenosine base editor” (ABE). Similarly, for purposes of the disclosure, reference to an “adenine deaminase” refers to the same entity as an “adenosine deaminase.” However, the person having ordinary skill in the art will appreciate that “adenine” refers to the purine base whereas “adenosine” refers to the larger nucleoside molecule that includes the purine base (adenine) and sugar moiety (e.g., either ribose or deoxyribose). In certain embodiments, the disclosure provides base editor fusion proteins comprising one or more adenosine deaminase domains. For instance, an adenosine deaminase domain may comprise a heterodimer of a first adenosine deaminase and a second deaminase domain, connected by a linker. Adenosine deaminases (e.g., engineered adenosine deaminases or evolved adenosine deaminases) provided herein may be enzymes that convert adenine (A) to inosine (I) in DNA or RNA. Such adenosine deaminase can lead to an A:T to G:C base pair conversion. In some embodiments, the deaminase is a variant of a naturally-occurring deaminase from an organism. In some embodiments, the deaminase does not occur in nature. For example, in some embodiments, the deaminase is at least 50%, at least 55%, at least 60%, at least 65%, at least 70%, at least 75% at least 80%, at least 85%, at least 90%, at least 95%, at least 96%, at least 97%, at least 98%, at least 99%, or at least 99.5% identical to a naturally-occurring deaminase.

[0087] In some embodiments, the adenosine deaminase is derived from a bacterium, such as, E. coli, S. aureus, S. typhi, S. putrefaciens, H. influenzae, or C. crescentus. In some embodiments, the adenosine deaminase is a TadA deaminase. In some embodiments, the TadA deaminase is an E. coli TadA deaminase (ecTadA). In some embodiments, the TadA deaminase is a truncated E. coli TadA deaminase. For example, the truncated ecTadA may be missing one or more N-terminal amino acids relative to a full-length ecTadA. In some embodiments, the truncated ecTadA may be missing 1, 2, 3, 4, 5, 6, 7, 8, 9, 10, 11, 12, 13, 14, 15, 6, 17, 18, 19, or 20 N-terminal amino acid residues relative to the full length ecTadA. In some embodiments, the truncated ecTadA may be missing 1, 2, 3, 4, 5, 6, 7, 8, 9, 10, 11, 12, 13, 14, 15, 6, 17, 18, 19, or 20 C-terminal amino acid residues relative to the full length ecTadA. In some embodiments, the ecTadA deaminase does not comprise an N-terminal methionine. Reference is made to U.S. Patent Publication No. 2018/0073012, published Mar. 15, 2018, which is incorporated herein by reference.

### Antisense Strand

[0088] In genetics, the “antisense” strand of a segment within double-stranded DNA is the template strand, and which is considered to run in the 3′ to 5′ orientation. By contrast, the “sense” strand is the segment within double-stranded DNA that runs from 5′ to 3′, and which is complementary to the antisense strand of DNA, or template strand, which runs from 3′ to 5′. In the case of a DNA segment that encodes a protein, the sense strand is the strand of DNA that has the same sequence as the mRNA, which takes the antisense strand as its template during transcription, and eventually undergoes (typically, not always) translation into a protein. The antisense strand is thus responsible for the RNA that is later translated to protein, while the sense strand possesses a nearly identical makeup to that of the mRNA. Note that for each segment of dsDNA, there will possibly be two sets of sense and antisense, depending on which direction one reads (since sense and antisense is relative to perspective). It is ultimately the gene product, or mRNA, that dictates which strand of one segment of dsDNA is referred to as sense or antisense.

### Base Editing

[0089] “Base editing” refers to genome editing technology that involves the conversion of a specific nucleic acid base into another at a targeted genomic locus. In certain embodiments, this can be achieved without requiring double-stranded DNA breaks (DSB), or single stranded breaks (i.e., nicking). To date, other genome editing techniques, including CRISPR-based systems, begin with the introduction of a DSB at a locus of interest. Subsequently, cellular DNA repair enzymes mend the break, commonly resulting in random insertions or deletions (indels) of bases at the site of the DSB. However, when the introduction or correction of a point mutation at a target locus is desired rather than stochastic disruption of the entire gene, these genome editing techniques are unsuitable, as correction rates are low (e.g. typically 0.1% to 5%), with the major genome editing products being indels. In order to increase the efficiency of gene correction without simultaneously introducing random indels, the present inventors previously modified the CRISPR/Cas9 system to directly convert one DNA base into another without DSB formation. See, Komor, A. C., et al., Programmable editing of a target base in genomic DNA without double-stranded DNA cleavage. Nature 533, 420-424 (2016), the entire contents of which is incorporated by reference herein.

### Base Editor

[0090] The term “base editor (BE)” as used herein, refers to an agent comprising a polypeptide that is capable of making a modification to a base (e.g., A, T, C, G, or U) within a nucleic acid sequence (e.g., DNA or RNA) that converts one base to another (e.g., A to G, A to C, A to T, C to T, C to G, C to A, G to A, G to C, G to T, T to A, T to C, T to G). In some embodiments, the base editor is capable of deaminating a base within a nucleic acid such as a base within a DNA molecule. In the case of an adenine base editor, the base editor is capable of deaminating an adenine (A) in DNA. Such base editors may include a nucleic acid programmable DNA binding protein (napDNAbp) fused to an adenosine deaminase. Some base editors include CRISPR-mediated fusion proteins that are utilized in the base editing methods described herein. In some embodiments, the base editor comprises a nuclease-inactive Cas9 (dCas9) fused to a deaminase which binds a nucleic acid in a guide RNA-programmed manner via the formation of an R-loop, but does not cleave the nucleic acid. For example, the dCas9 domain of the fusion protein may include a D10A and a H840A mutation (which renders Cas9 capable of cleaving only one strand of a nucleic acid duplex), as described in PCT/US2016/058344, which published as WO 2017/070632 on Apr. 27, 2017, and is incorporated herein by reference in its entirety. The DNA cleavage domain of S. pyogenes Cas9 includes two subdomains, the HNH nuclease subdomain and the RuvC1 subdomain. The HNH subdomain cleaves the strand complementary to the gRNA (the “targeted strand”, or the strand in which editing or deamination occurs), whereas the RuvC1 subdomain cleaves the non-complementary strand containing the PAM sequence (the “non-edited strand”). The RuvC1 mutant D10A generates a nick in the targeted strand, while the HNH mutant H840A generates a nick on the non-edited strand (see Jinek et al., Science, 337:816-821(2012); Qi et al., Cell. 28; 152(5):1173-83 (2013)).

[0091] In some embodiments, a nucleobase editor is a macromolecule or macromolecular complex that results primarily (e.g., more than 80%, more than 85%, more than 90%, more than 95%, more than 99%, more than 99.9%, or 100%) in the conversion of a nucleobase in a polynucleic acid sequence into another nucleobase (i.e., a transition or transversion) using a combination of 1) a nucleotide-, nucleoside-, or nucleobase-modifying enzyme; and 2) a nucleic acid binding protein that can be programmed to bind to a specific nucleic acid sequence.

[0092] In some embodiments, the nucleobase editor comprises a DNA binding domain (e.g., a programmable DNA binding domain such as a dCas9 or nCas9) that directs it to a target sequence. In some embodiments, the nucleobase editor comprises a nucleobase modifying enzyme fused to a programmable DNA binding domain (e.g., a dCas9 or nCas9). A “nucleobase modifying enzyme” is an enzyme that can modify a nucleobase and convert one nucleobase to another (e.g., a deaminase such as a cytidine deaminase or a adenosine deaminase). In some embodiments, the nucleobase editor may target cytosine (C) bases in a nucleic acid sequence and convert the C to thymine (T) base. In some embodiments, the C to T editing is carried out by a deaminase, e.g., a cytidine deaminase. Base editors that can carry out other types of base conversions (e.g., adenosine (A) to guanine (G), C to G) are also contemplated.

[0093] Nucleobase editors that convert a C to T, in some embodiments, comprise a cytidine deaminase. A “cytidine deaminase” refers to an enzyme that catalyzes the chemical reaction “cytosine+H₂O→uracil+NH₃” or “5-methyl-cytosine+H₂O→thymine+NH₃.” As it may be apparent from the reaction formula, such chemical reactions result in a C to U/T nucleobase change. In the context of a gene, such a nucleotide change, or mutation, may in turn lead to an amino acid change in the protein, which may affect the protein's function, e.g., loss-of-function or gain-of-function. In some embodiments, the C to T nucleobase editor comprises a dCas9 or nCas9 fused to a cytidine deaminase. In some embodiments, the cytidine deaminase domain is fused to the N-terminus of the dCas9 or nCas9. In some embodiments, the nucleobase editor further comprises a domain that inhibits uracil glycosylase, and/or a nuclear localization signal. Such nucleobase editors have been described in the art, e.g., in Rees & Liu, Nat Rev Genet. 2018; 19(12):770-788 and Koblan et al., Nat Biotechnol. 2018; 36(9):843-846; as well as. U.S. Patent Publication No. 2018/0073012, published Mar. 15, 2018, which issued as U.S. Pat. No. 10,113,163; on Oct. 30, 2018; U.S. Patent Publication No. 2017/0121693, published May 4, 2017, which issued as U.S. Pat. No. 10,167,457 on Jan. 1, 2019; International Publication No. WO 2017/070633, published Apr. 27, 2017; U.S. Patent Publication No. 2015/0166980, published Jun. 18, 2015; U.S. Pat. No. 9,840,699, issued Dec. 12, 2017; U.S. Pat. No. 10,077,453, issued Sep. 18, 2018; International Publication No. WO 2019/023680, published Jan. 31, 2019; International Publication No. WO 2018/0176009, published Sep. 27, 2018, International Application No PCT/US2019/033848, filed May 23, 2019, International Application No. PCT/US2019/47996, filed Aug. 23, 2019; International Application No. PCT/US2019/049793, filed Sep. 5, 2019; U.S. Provisional Application No. 62/835,490, filed Apr. 17, 2019; International Application No. PCT/US2019/61685, filed Nov. 15, 2019; International Application No. PCT/US2019/57956, filed Oct. 24, 2019; U.S. Provisional Application No. 62/858,958, filed Jun. 7, 2019; International Publication No. PCT/US2019/58678, filed Oct. 29, 2019, the contents of each of which are incorporated herein by reference in their entireties.

[0094] In some embodiments, a nucleobase editor converts an A to G. In some embodiments, the nucleobase editor comprises an adenosine deaminase. An “adenosine deaminase” is an enzyme involved in purine metabolism. It is needed for the breakdown of adenosine from food and for the turnover of nucleic acids in tissues. Its primary function in humans is the development and maintenance of the immune system. An adenosine deaminase catalyzes hydrolytic deamination of adenosine (forming inosine, which base pairs as G) in the context of DNA. There are no known adenosine deaminases that act on DNA. Instead, known adenosine deaminase enzymes only act on RNA (tRNA or mRNA). Evolved deoxyadenosine deaminase enzymes that accept DNA substrates and deaminate dA to deoxyinosine have been described, e.g., in PCT Application PCT/US2017/045381, filed Aug. 3, 2017, which published as WO 2018/027078, and PCT Application No. PCT/US2019/033848, which published as WO 2019/226953, each of which is herein incorporated by reference by reference.

[0095] Exemplary adenine and cytosine base editors are also described in Rees & Liu, Base editing: precision chemistry on the genome and transcriptome of living cells, Nat. Rev. Genet. 2018; 19(12):770-788; as well as U.S. Patent Publication No. 2018/0073012, published Mar. 15, 2018, which issued as U.S. Pat. No. 10,113,163, on Oct. 30, 2018; U.S. Patent Publication No. 2017/0121693, published May 4, 2017, which issued as U.S. Pat. No. 10,167,457 on Jan. 1, 2019; International Publication No. WO 2017/070633, published Apr. 27, 2017; U.S. Patent Publication No. 2015/0166980, published Jun. 18, 2015; U.S. Pat. No. 9,840,699, issued Dec. 12, 2017; and U.S. Pat. No. 10,077,453, issued Sep. 18, 2018, the contents of each of which are incorporated herein by reference in their entireties.

[0096] The term “evolved base editor” or “evolved base editor variant” refers to a base editor formed as a result of mutagenizing a reference or starting-point base editor. The term refers to embodiments in which the nucleotide modification domain is evolved or a separate domain is evolved. Mutagenizing a reference (or starting-point) base editor may comprise mutagenizing an adenosine deaminase. Amino acid sequence variations may include one or more mutated residues within the amino acid sequence of a reference base editor, e.g., as a result of a change in the nucleotide sequence encoding the base editor that results in a change in the codon at any particular position in the coding sequence, the deletion of one or more amino acids (e.g., a truncated protein), the insertion of one or more amino acids, or any combination of the foregoing. The evolved base editor may include variants in one or more components or domains of the base editor (e.g., mutations introduced into one or more adenosine deaminases).

### Cas9

[0097] The term “Cas9” or “Cas9 nuclease” refers to an RNA-guided nuclease comprising a Cas9 domain, or a fragment thereof (e.g., a protein comprising an active or inactive DNA cleavage domain of Cas9, and/or the gRNA binding domain of Cas9). A “Cas9 domain” as used herein, is a protein fragment comprising an active or inactive cleavage domain of Cas9 and/or the gRNA binding domain of Cas9. A “Cas9 protein” is a full length Cas9 protein. A Cas9 nuclease is also referred to sometimes as a casn1 nuclease or a CRISPR (Clustered Regularly Interspaced Short Palindromic Repeat)-associated nuclease. CRISPR is an adaptive immune system that provides protection against mobile genetic elements (viruses, transposable elements, and conjugative plasmids). CRISPR clusters contain spacers, sequences complementary to antecedent mobile elements, and target invading nucleic acids. CRISPR clusters are transcribed and processed into CRISPR RNA (crRNA). In type II CRISPR systems correct processing of pre-crRNA requires a trans-encoded small RNA (tracrRNA), endogenous ribonuclease 3 (rnc) and a Cas9 domain. The tracrRNA serves as a guide for ribonuclease 3-aided processing of pre-crRNA. Subsequently, Cas9/crRNA/tracrRNA endonucleolytically cleaves linear or circular dsDNA target complementary to the spacer. The target strand not complementary to crRNA is first cut endonucleolytically, then trimmed 3′-5′ exonucleolytically. In nature, DNA-binding and cleavage typically requires protein and both RNAs. However, single guide RNAs (“sgRNA”, or simply “gNRA”) can be engineered so as to incorporate aspects of both the crRNA and tracrRNA into a single RNA species. See, e.g., Jinek M., Chylinski K., Fonfara I., Hauer M., Doudna J. A., Charpentier E. Science 337:816-821(2012), the entire contents of which are hereby incorporated by reference. Cas9 recognizes a short motif in the CRISPR repeat sequences (the PAM or protospacer adjacent motif) to help distinguish self versus non-self. Cas9 nuclease sequences and structures are well known to those of skill in the art (see, e.g., “Complete genome sequence of an M1 strain of Streptococcus pyogenes.” Ferretti et al., J. J., McShan W. M., Ajdic D. J., Savic D. J., Savic G., Lyon K., Primeaux C., Sezate S., Suvorov A. N., Kenton S., Lai H. S., Lin S. P., Qian Y., Jia H. G., Najar F. Z., Ren Q., Zhu H., Song L., White J., Yuan X., Clifton S. W., Roe B. A., McLaughlin R E., Proc. Natl. Acad. Sci. U.S.A. 98:4658-4663(2001); “CRISPR RNA maturation by trans-encoded small RNA and host factor RNase III.” Deltcheva E., Chylinski K., Sharma C. M., Gonzales K., Chao Y., Pirzada Z. A., Eckert M. R., Vogel J., Charpentier E., Nature 471:602-607(2011); and “A programmable dual-RNA-guided DNA endonuclease in adaptive bacterial immunity.” Jinek M., Chylinski K., Fonfara I., Hauer M., Doudna J. A., Charpentier E. Science 337:816-821(2012), the entire contents of each of which are incorporated herein by reference). Cas9 orthologs have been described in various species, including, but not limited to, S. pyogenes and S. thermophilus. Additional suitable Cas9 nucleases and sequences will be apparent to those of skill in the art based on this disclosure, and such Cas9 nucleases and sequences include Cas9 sequences from the organisms and loci disclosed in Chylinski, Rhun, and Charpentier, “The tracrRNA and Cas9 families of type II CRISPR-Cas immunity systems” (2013) RNA Biology 10:5, 726-737; the entire contents of which are incorporated herein by reference. In some embodiments, a Cas9 nuclease comprises one or more mutations that partially impair or inactivate the DNA cleavage domain.

[0098] A nuclease-inactivated Cas9 domain may interchangeably be referred to as a “dCas9” protein (for nuclease-“dead” Cas9). Methods for generating a Cas9 domain (or a fragment thereof) having an inactive DNA cleavage domain are known (see, e.g., Jinek et al., Science. 337:816-821(2012); Qi et al., “Repurposing CRISPR as an RNA-Guided Platform for Sequence-Specific Control of Gene Expression” (2013) Cell. 28; 152(5):1173-83, the entire contents of each of which are incorporated herein by reference). For example, the DNA cleavage domain of Cas9 is known to include two subdomains, the HNH nuclease subdomain and the RuvC1 subdomain. The HNH subdomain cleaves the strand complementary to the gRNA, whereas the RuvC1 subdomain cleaves the non-complementary strand. Mutations within these subdomains can silence the nuclease activity of Cas9. For example, the mutations D10A and H840A completely inactivate the nuclease activity of S. pyogenes Cas9 (Jinek et al., Science. 337:816-821(2012); Qi et al., Cell. 28; 152(5):1173-83 (2013)). In some embodiments, proteins comprising fragments of Cas9 are provided. For example, in some embodiments, a protein comprises one of two Cas9 domains: (1) the gRNA binding domain of Cas9; or (2) the DNA cleavage domain of Cas9. In some embodiments, proteins comprising Cas9 or fragments thereof are referred to as “Cas9 variants.” A Cas9 variant shares homology to Cas9, or a fragment thereof. For example, a Cas9 variant is at least about 70% identical, at least about 80% identical, at least about 90% identical, at least about 95% identical, at least about 96% identical, at least about 97% identical, at least about 98% identical, at least about 99% identical, at least about 99.5% identical, at least about 99.8% identical, or at least about 99.9% identical to wild type Cas9 (e.g., SpCas9 of SEQ ID NO: 5). In some embodiments, the Cas9 variant may have 1, 2, 3, 4, 5, 6, 7, 8, 9, 10, 11, 12, 13, 14, 15, 16, 17, 18, 19, 20, 21, 22, 21, 24, 25, 26, 27, 28, 29, 30, 31, 32, 33, 34, 35, 36, 37, 38, 39, 40, 41, 42, 43, 44, 45, 46, 47, 48, 49, 50, or more amino acid changes compared to wild type Cas9 (e.g., SpCas9 of SEQ ID NO: 5). In some embodiments, the Cas9 variant comprises a fragment of Cas9 (e.g., a gRNA binding domain or a DNA-cleavage domain), such that the fragment is at least about 70% identical, at least about 80% identical, at least about 90% identical, at least about 95% identical, at least about 96% identical, at least about 97% identical, at least about 98% identical, at least about 99% identical, at least about 99.5% identical, or at least about 99.9% identical to the corresponding fragment of wild type Cas9 (e.g., SpCas9 of SEQ ID NO: 5). In some embodiments, the fragment is at least 30%, at least 35%, at least 40%, at least 45%, at least 50%, at least 55%, at least 60%, at least 65%, at least 70%, at least 75%, at least 80%, at least 85%, at least 90%, at least 95% identical, at least 96%, at least 97%, at least 98%, at least 99%, or at least 99.5% of the amino acid length of a corresponding wild type Cas9 (e.g., SpCas9 of SEQ ID NO: 5).

[0099] As used herein, the term “nCas9” or “Cas9 nickase” refers to a Cas9 or a variant thereof, which cleaves or nicks only one of the strands of a target cut site thereby introducing a nick in a double strand DNA molecule rather than creating a double strand break. This can be achieved by introducing appropriate mutations in a wild-type Cas9 which inactivates one of the two endonuclease activities of the Cas9. Any suitable mutation which inactivates one Cas9 endonuclease activity but leaves the other intact is contemplated, such as one of D10A or H840A mutations in the wild-type S. pyogenes Cas9 amino acid sequence, or a D10A mutation in the wild-type S. aureus Cas9 amino acid sequence, may be used to form the nCas9.

cDNA

[0100] The term “cDNA” refers to a strand of DNA copied from an RNA template. cDNA is complementary to the RNA template.

### Circular Permutant

[0101] As used herein, the term “circular permutant” refers to a protein or polypeptide (e.g., a Cas9) comprising a circular permutation, which is change in the protein's structural configuration involving a change in order of amino acids appearing in the protein's amino acid sequence. In other words, circular permutants are proteins that have altered N- and C-termini as compared to a wild-type counterpart, e.g., the wild-type C-terminal half of a protein becomes the new N-terminal half. Circular permutation (or CP) is essentially the topological rearrangement of a protein's primary sequence, connecting its N- and C-terminus, often with a peptide linker, while concurrently splitting its sequence at a different position to create new, adjacent N- and C-termini. The result is a protein structure with different connectivity, but which often can have the same overall similar three-dimensional (3D) shape, and possibly include improved or altered characteristics, including, reduced proteolytic susceptibility, improved catalytic activity, altered substrate or ligand binding, and/or improved thermostability. Circular permutant proteins can occur in nature (e.g., concanavalin A and lectin). In addition, circular permutation can occur as a result of posttranslational modifications or may be engineered using recombinant techniques (e.g., see, Oakes et al., “Protein Engineering of Cas9 for enhanced function,” Methods Enzymol, 2014, 546: 491-511 and Oakes et al., “CRISPR-Cas9 Circular Permutants as Programmable Scaffolds for Genome Modification,” Cell, Jan. 10, 2019, 176: 254-267, each of are incorporated herein by reference).

Circularly Permuted napDNAbp

[0102] The term “circularly permuted napDNAbp” refers to any napDNAbp protein, or variant thereof (e.g., SpCas9), that occurs as or engineered as a circular permutant, whereby its N- and C-termini have been topically rearranged. Such circularly permuted proteins (“CP-napDNAbp”, such as “CP-Cas9” in the case of Cas9), or variants thereof, retain the ability to bind DNA when complexed with a guide RNA (gRNA). See, Oakes et al., “Protein Engineering of Cas9 for enhanced function,” Methods Enzymol, 2014, 546: 491-511 and Oakes et al., “CRISPR-Cas9 Circular Permutants as Programmable Scaffolds for Genome Modification,” Cell, Jan. 10, 2019, 176: 254-267, each of are incorporated herein by reference. The instant disclosure contemplates any previously known CP-Cas9 or use a new CP-Cas9 so long as the resulting circularly permuted protein retains the ability to bind DNA when complexed with a guide RNA (gRNA).

### Cytidine Deaminase (or Cytosine Deaminase)

[0103] As used herein, the term “cytidine deaminase” or “cytidine deaminase domain” refers to a protein or enzyme that catalyzes a deamination reaction of a cytidine or cytosine. The terms “cytidine” and “cytosine” are used interchangeably for purposes of the present disclosure. For example, for purposes of the disclosure, reference to an “cytidine base editor” (CBE) refers to the same entity as an “cytosine base editor” (CBE). Similarly, for purposes of the disclosure, reference to an “cytidine deaminase” refers to the same entity as an “cytosine deaminase.” However, the person having ordinary skill in the art will appreciate that “cytosine” refers to the pyrimidine base whereas “cytidine” refers to the larger nucleoside molecule that includes the pyrimidine base (cytosine) and sugar moiety (e.g., either ribose or deoxyribose). A cytidine deaminase is encoded by the CDA gene and is an enzyme that catalyzes the removal of an amine group from cytidine (i.e., the base cytosine when attached to a ribose ring, i.e., the nucleoside referred to as cytidine) to uridine (C to U) and deoxycytidine to deoxyuridine (C to U). A non-limiting example of a cytidine deaminase is APOBEC1 (“apolipoprotein B mRNA editing enzyme, catalytic polypeptide 1”). Another example is AID (“activation-induced cytidine deaminase”). Under standard Watson-Crick hydrogen bond pairing, a cytosine base hydrogen bonds to a guanine base. When cytidine is converted to uridine (or deoxycytidine is converted to deoxyuridine), the uridine (or the uracil base of uridine) undergoes hydrogen bond pairing with the base adenine. Thus, a conversion of “C” to uridine (“U”) by cytidine deaminase will cause the insertion of “A” instead of a “G” during cellular repair and/or replication processes. Since the adenine “A” pairs with thymine “T”, the cytidine deaminase in coordination with DNA replication causes the conversion of an C G pairing to a T A pairing in the double-stranded DNA molecule.

### CRISPR

[0104] CRISPR is a family of DNA sequences (i.e., CRISPR clusters) in bacteria and archaea that represent snippets of prior infections by a virus that have invaded the prokaryote. The snippets of DNA are used by the prokaryotic cell to detect and destroy DNA from subsequent attacks by similar viruses and effectively compose, along with an array of CRISPR-associated proteins (including Cas9 and homologs thereof) and CRISPR-associated RNA, a prokaryotic immune defense system. In nature, CRISPR clusters are transcribed and processed into CRISPR RNA (crRNA). In certain types of CRISPR systems (e.g., type II CRISPR systems), correct processing of pre-crRNA requires a trans-encoded small RNA (tracrRNA), endogenous ribonuclease 3 (rnc) and a Cas9 protein. The tracrRNA serves as a guide for ribonuclease 3-aided processing of pre-crRNA. Subsequently, Cas9/crRNA/tracrRNA endonucleolytically cleaves linear or circular dsDNA target complementary to the RNA. Specifically, the target strand not complementary to crRNA is first cut endonucleolytically, then trimmed 3′-5′ exonucleolytically. In nature, DNA-binding and cleavage typically requires protein and both RNAs. However, single guide RNAs (“sgRNA”, or simply “gRNA”) can be engineered so as to incorporate aspects of both the crRNA and tracrRNA into a single RNA species—the guide RNA. See, e.g., Jinek M., Chylinski K., Fonfara I., Hauer M., Doudna J. A., Charpentier E. Science 337:816-821(2012), the entire contents of which is hereby incorporated by reference. Cas9 recognizes a short motif in the CRISPR repeat sequences (the PAM or protospacer adjacent motif) to help distinguish self versus non-self CRISPR biology, as well as Cas9 nuclease sequences and structures are well known to those of skill in the art (see, e.g., “Complete genome sequence of an M1 strain of Streptococcus pyogenes.” Ferretti et al., J. J., McShan W. M., Ajdic D. J., Savic D. J., Savic G., Lyon K., Primeaux C., Sezate S., Suvorov A. N., Kenton S., Lai H. S., Lin S. P., Qian Y., Jia H. G., Najar F. Z., Ren Q., Zhu H., Song L., White J., Yuan X., Clifton S. W., Roe B. A., McLaughlin R. E., Proc. Natl. Acad. Sci. U.S.A. 98:4658-4663(2001); “CRISPR RNA maturation by trans-encoded small RNA and host factor RNase III.” Deltcheva E., Chylinski K., Sharma C. M., Gonzales K., Chao Y., Pirzada Z. A., Eckert M. R., Vogel J., Charpentier E., Nature 471:602-607(2011); and “A programmable dual-RNA-guided DNA endonuclease in adaptive bacterial immunity.” Jinek M., Chylinski K., Fonfara I., Hauer M., Doudna J. A., Charpentier E. Science 337:816-821(2012), the entire contents of each of which are incorporated herein by reference). Cas9 orthologs have been described in various species, including, but not limited to, S. pyogenes and S. thermophilus. Additional suitable Cas9 nucleases and sequences will be apparent to those of skill in the art based on this disclosure, and such Cas9 nucleases and sequences include Cas9 sequences from the organisms and loci disclosed in Chylinski, Rhun, and Charpentier, “The tracrRNA and Cas9 families of type II CRISPR-Cas immunity systems” (2013) RNA Biology 10:5, 726-737; the entire contents of which are incorporated herein by reference.

### Deaminase

[0105] The term “deaminase” or “deaminase domain” refers to a protein or enzyme that catalyzes a deamination reaction. In some embodiments, the deaminase is an adenosine (or adenine) deaminase, which catalyzes the hydrolytic deamination of adenine or adenosine. In some embodiments, the adenosine deaminase catalyzes the hydrolytic deamination of adenine or adenosine in deoxyribonucleic acid (DNA) to inosine. In other embodiments, the deminase is a cytidine (or cytosine) deaminase, which catalyzes the hydrolytic deamination of cytidine or cytosine.

[0106] The deaminases provided herein may be from any organism, such as a bacterium. In some embodiments, the deaminase or deaminase domain is a variant of a naturally-occurring deaminase from an organism. In some embodiments, the deaminase or deaminase domain does not occur in nature. For example, in some embodiments, the deaminase or deaminase domain is at least 50%, at least 55%, at least 60%, at least 65%, at least 70%, at least 75% at least 80%, at least 85%, at least 90%, at least 95%, at least 96%, at least 97%, at least 98%, at least 99%, or at least 99.5% identical to a naturally-occurring deaminase.

### DNA Binding Protein

[0107] As used herein, the term “DNA binding protein” or “DNA binding protein domain” refers to any protein that localizes to and binds a specific target DNA nucleotide sequence (e.g. a gene locus of a genome). This term embraces RNA-programmable proteins, which associate (e.g. form a complex) with one or more nucleic acid molecules (i.e., which includes, for example, guide RNA in the case of Cas systems) that direct or otherwise program the protein to localize to a specific target nucleotide sequence (e.g., DNA sequence) that is complementary to the one or more nucleic acid molecules (or a portion or region thereof) associated with the protein. Exemplary RNA-programmable proteins are CRISPR-Cas9 proteins, as well as Cas9 equivalents, homologs, orthologs, or paralogs, whether naturally occurring or non-naturally occurring (e.g. engineered or modified), and may include a Cas9 equivalent from any type of CRISPR system (e.g. type II, V, VI), including Cpf1 (a type-V CRISPR-Cas systems), C2c1 (a type V CRISPR-Cas system), C2c2 (a type VI CRISPR-Cas system), C2c3 (a type V CRISPR-Cas system), dCas9, GeoCas9, CjCas9, Cas12a, Cas12b, Cas12c, Cas12d, Cas12g, Cas12h, Cas12i, Cas13d, Cas14, Argonaute, and nCas9. Further Cas-equivalents are described in Makarova et al., “C2c2 is a single-component programmable RNA-guided RNA-targeting CRISPR effector,” Science 2016; 353(6299), the contents of which are incorporated herein by reference.

### DNA Editing Efficiency

[0108] The term “DNA editing efficiency,” as used herein, refers to the number or proportion of intended base pairs that are edited. For example, if a base editor edits 10% of the base pairs that it is intended to target (e.g., within a cell or within a population of cells), then the base editor can be described as being 10% efficient. Some aspects of editing efficiency embrace the modification (e.g. deamination) of a specific nucleotide within DNA, without generating a large number or percentage of insertions or deletions (i.e., indels). It is generally accepted that editing while generating less than 5% indels (as measured over total target nucleotide substrates) is high editing efficiency. The generation of more than 20% indels is generally accepted as poor or low editing efficiency. Indel formation may be measured by techniques known in the art, including high-throughput screening of sequencing reads.

### Downstream

[0109] As used herein, the terms “upstream” and “downstream” are terms of relativety that define the linear position of at least two elements located in a nucleic acid molecule (whether single or double-stranded) that is orientated in a 5′-to-3′ direction. In particular, a first element is upstream of a second element in a nucleic acid molecule where the first element is positioned somewhere that is 5′ to the second element. For example, a SNP is upstream of a Cas9-induced nick site if the SNP is on the 5′ side of the nick site. Conversely, a first element is downstream of a second element in a nucleic acid molecule where the first element is positioned somewhere that is 3′ to the second element. For example, a SNP is downstream of a Cas9-induced nick site if the SNP is on the 3′ side of the nick site. The nucleic acid molecule can be a DNA (double or single stranded). RNA (double or single stranded), or a hybrid of DNA and RNA. The analysis is the same for single strand nucleic acid molecule and a double strand molecule since the terms upstream and downstream are in reference to only a single strand of a nucleic acid molecule, except that one needs to select which strand of the double stranded molecule is being considered. Often, the strand of a double stranded DNA which can be used to determine the positional relativity of at least two elements is the “sense” or “coding” strand. In genetics, a “sense” strand is the segment within double-stranded DNA that runs from 5′ to 3′, and which is complementary to the antisense strand of DNA, or template strand, which runs from 3′ to 5′. Thus, as an example, a SNP nucleobase is “downstream” of a promoter sequence in a genomic DNA (which is double-stranded) if the SNP nucleobase is on the 3′ side of the promoter on the sense or coding strand.

### Effective Amount

[0110] The term “effective amount,” as used herein, refers to an amount of a biologically active agent that is sufficient to elicit a desired biological response. For example, in some embodiments, an effective amount of a base editor may refer to the amount of the editor that is sufficient to edit a target site nucleotide sequence, e.g., a genome. In some embodiments, an effective amount of a base editor provided herein, e.g., of a fusion protein comprising a nickase Cas9 domain and a guide RNA may refer to the amount of the fusion protein that is sufficient to induce editing of a target site specifically bound and edited by the fusion protein. As will be appreciated by the skilled artisan, the effective amount of an agent, e.g., a fusion protein, a nuclease, a hybrid protein, a protein dimer, a complex of a protein (or protein dimer) and a polynucleotide, or a polynucleotide, may vary depending on various factors as, for example, on the desired biological response, e.g., on the specific allele, genome, or target site to be edited, on the cell or tissue being targeted, and on the agent being used.

### Functional Equivalent

[0111] The term “functional equivalent” refers to a second biomolecule that is equivalent in function, but not necessarily equivalent in structure to a first biomolecule. For example, a “Cas9 equivalent” refers to a protein that has the same or substantially the same functions as Cas9, but not necessarily the same amino acid sequence. In the context of the disclosure, the specification refers throughout to “a protein X, or a functional equivalent thereof” In this context, a “functional equivalent” of protein X embraces any homolog, paralog, fragment, naturally occurring, engineered, circular permutant, mutated, or synthetic version of protein X which bears an equivalent function.

### Fusion Protein

[0112] The term “fusion protein” as used herein refers to a hybrid polypeptide which comprises protein domains from at least two different proteins. One protein may be located at the amino-terminal (N-terminal) portion of the fusion protein or at the carboxy-terminal (C-terminal) protein thus forming an “amino-terminal fusion protein” or a “carboxy-terminal fusion protein,” respectively. A protein may comprise different domains, for example, a nucleic acid binding domain (e.g., the gRNA binding domain of Cas9 that directs the binding of the protein to a target site) and a nucleic acid cleavage domain or a catalytic domain of a nucleic-acid editing protein. Another example includes a Cas9 or equivalent thereof fused to an adenosine deaminae. Any of the proteins provided herein may be produced by any method known in the art. For example, the proteins provided herein may be produced via recombinant protein expression and purification, which is especially suited for fusion proteins comprising a peptide linker. Methods for recombinant protein expression and purification are well known, and include those described by Green and Sambrook, Molecular Cloning: A Laboratory Manual (4^{th} ed., Cold Spring Harbor Laboratory Press, Cold Spring Harbor, N.Y. (2012)), the entire contents of which are incorporated herein by reference.

### Guide Nucleic Acid

[0113] The term “guide nucleic acid” or “napDNAbp-programming nucleic acid molecule” or equivalently “guide sequence” refers the one or more nucleic acid molecules which associate with and direct or otherwise program a napDNAbp protein to localize to a specific target nucleotide sequence (e.g., a gene locus of a genome) that is complementary to the one or more nucleic acid molecules (or a portion or region thereof) associated with the protein, thereby causing the napDNAbp protein to bind to the nucleotide sequence at the specific target site. A non-limiting example is a guide RNA of a Cas protein of a CRISPR-Cas genome editing system.

[0114] Guide RNA is a particular type of guide nucleic acid which is mostly commonly associated with a Cas protein of a CRISPR-Cas9 and which associates with Cas9, directing the Cas9 protein to a specific sequence in a DNA molecule that includes complementarity to protospace sequence of the guide RNA. As used herein, a “guide RNA” refers to a synthetic fusion of the endogenous bacterial crRNA and tracrRNA that provides both targeting specificity and scaffolding and/or binding ability for Cas9 nuclease to a target DNA. This synthetic fusion does not exist in nature and is also commonly referred to as an sgRNA. However, this term also embraces the equivalent guide nucleic acid molecules that associate with Cas9 equivalents, homologs, orthologs, or paralogs, whether naturally occurring or non-naturally occurring (e.g., engineered or recombinant), and which otherwise program the Cas9 equivalent to localize to a specific target nucleotide sequence. The Cas9 equivalents may include other napDNAbp from any type of CRISPR system (e.g., type II, V, VI), including Cpf1 (a type-V CRISPR-Cas systems), C2c1 (a type V CRISPR-Cas system), C2c2 (a type VI CRISPR-Cas system) and C2c3 (a type V CRISPR-Cas system). Further Cas-equivalents are described in Makarova et al., “C2c2 is a single-component programmable RNA-guided RNA-targeting CRISPR effector,” Science 2016; 353(6299), the contents of which are incorporated herein by reference. Exemplary sequences are and structures of guide RNAs are provided herein. In addition, methods for designing appropriate guide RNA sequences are provided herein.

Guide RNA (“gRNA”)

[0115] As used herein, the term “guide RNA” is a particular type of guide nucleic acid which is mostly commonly associated with a Cas protein of a CRISPR-Cas9 and which associates with Cas9, directing the Cas9 protein to a specific sequence in a DNA molecule that includes complementarity to protospace sequence of the guide RNA. However, this term also embraces the equivalent guide nucleic acid molecules that associate with Cas9 equivalents, homologs, orthologs, or paralogs, whether naturally occurring or non-naturally occurring (e.g., engineered or recombinant), and which otherwise program the Cas9 equivalent to localize to a specific target nucleotide sequence. The Cas9 equivalents may include other napDNAbp from any type of CRISPR system (e.g., type II, V, VI), including Cpf1 (a type-V CRISPR-Cas systems), C2c1 (a type V CRISPR-Cas system), C2c2 (a type VI CRISPR-Cas system) and C2c3 (a type V CRISPR-Cas system). Further Cas-equivalents are described in Makarova et al., “C2c2 is a single-component programmable RNA-guided RNA-targeting CRISPR effector,” Science 2016; 353(6299), the contents of which are incorporated herein by reference. Exemplary sequences are and structures of guide RNAs are provided herein.

[0116] Guide RNAs may comprise various structural elements that include, but are not limited to (a) a spacer sequence—the sequence in the guide RNA (having ˜20 nts in length) which binds to a complementary strand of the target DNA (and has the same sequence as the protospacer of the DNA) and (b) a gRNA core (or gRNA scaffold or backbone sequence)—refers to the sequence within the gRNA that is responsible for Cas9 binding, it does not include the ˜20 bp spacer sequence that is used to guide Cas9 to target DNA.

### Guide RNA Target Sequence

[0117] As used herein, the “guide RNA target sequence” refers to the ˜20 nucleotides that are complementary to the protospacer sequence in the PAM strand. The target sequence is the sequence that anneals to or is targeted by the spacer sequence of the guide RNA. The spacer sequence of the guide RNA and the protospacer have the same sequence (except the spacer sequence is RNA and the protospacer is DNA).

### Guide RNA Scaffold Sequence

[0118] As used herein, the “guide RNA scaffold sequence” refers to the sequence within the gRNA that is responsible for Cas9 binding, it does not include the 20 bp spacer/targeting sequence that is used to guide Cas9 to target DNA.

### Host Cell

[0119] The term “host cell,” as used herein, refers to a cell that can host, replicate, and transfer a phage vector useful for a continuous evolution process as provided herein. In embodiments where the vector is a viral vector, a suitable host cell is a cell that may be infected by the viral vector, can replicate it, and can package it into viral particles that can infect fresh host cells. A cell can host a viral vector if it supports expression of genes of viral vector, replication of the viral genome, and/or the generation of viral particles. One criterion to determine whether a cell is a suitable host cell for a given viral vector is to determine whether the cell can support the viral life cycle of a wild-type viral genome that the viral vector is derived from. For example, if the viral vector is a modified M13 phage genome, as provided in some embodiments described herein, then a suitable host cell would be any cell that can support the wild-type M13 phage life cycle. Suitable host cells for viral vectors useful in continuous evolution processes are well known to those of skill in the art, and the disclosure is not limited in this respect. In some embodiments, the viral vector is a phage and the host cell is a bacterial cell. In some embodiments, the host cell is an E. coli cell. Suitable E. coli host strains will be apparent to those of skill in the art, and include, but are not limited to, New England Biolabs (NEB) Turbo, Top10F′, DH12S, ER2738, ER2267, and XL1-Blue MRF′. These strain names are art recognized and the genotype of these strains has been well characterized. It should be understood that the above strains are exemplary only and that the invention is not limited in this respect. The term “fresh,” as used herein interchangeably with the terms “non-infected” or “uninfected” in the context of host cells, refers to a host cell that has not been infected by a viral vector comprising a gene of interest as used in a continuous evolution process provided herein. A fresh host cell can, however, have been infected by a viral vector unrelated to the vector to be evolved or by a vector of the same or a similar type but not carrying the gene of interest.

[0120] In some embodiments, the host cell is a prokaryotic cell, for example, a bacterial cell. In some embodiments, the host cell is an E. coli cell. In some embodiments, the host cell is a eukaryotic cell, for example, a yeast cell, an insect cell, or a mammalian cell. The type of host cell, will, of course, depend on the viral vector employed, and suitable host cell/viral vector combinations will be readily apparent to those of skill in the art.

### Inteins and Split-Inteins

[0121] As used herein, the term “intein” refers to auto-processing polypeptide domains found in organisms from all domains of life. An intein (intervening protein) carries out a unique auto-processing event known as protein splicing in which it excises itself out from a larger precursor polypeptide through the cleavage of two peptide bonds and, in the process, ligates the flanking extein (external protein) sequences through the formation of a new peptide bond. This rearrangement occurs post-translationally (or possibly co-translationally), as intein genes are found embedded in frame within other protein-coding genes. Furthermore, intein-mediated protein splicing is spontaneous; it requires no external factor or energy source, only the folding of the intein domain. This process is also known as cis-protein splicing, as opposed to the natural process of trans-protein splicing with “split inteins.”

[0122] Split inteins are a sub-category of inteins. Unlike the more common contiguous inteins, split inteins are transcribed and translated as two separate polypeptides, the N-intein and C-intein, each fused to one extein. Upon translation, the intein fragments spontaneously and non-covalently assemble into the canonical intein structure to carry out protein splicing in trans.

[0123] Inteins and split inteins are the protein equivalent of the self-splicing RNA introns (see Perler et al., Nucleic Acids Res. 22:1125-1127 (1994)), which catalyze their own excision from a precursor protein with the concomitant fusion of the flanking protein sequences, known as exteins (reviewed in Perler et al., Curr. Opin. Chem. Biol. 1:292-299 (1997); Perler, F. B. Cell 92(1):1-4 (1998); Xu et al., EMBO J. 15(19):5146-5153 (1996)).

[0124] As used herein, the term “protein splicing” refers to a process in which an interior region of a precursor protein (an intein) is excised and the flanking regions of the protein (exteins) are ligated to form the mature protein. This natural process has been observed in numerous proteins from both prokaryotes and eukaryotes (Perler, F. B., Xu, M. Q., Paulus, H. Current Opinion in Chemical Biology 1997, 1, 292-299; Perler, F. B. Nucleic Acids Research 1999, 27, 346-347). The intein unit contains the necessary components needed to catalyze protein splicing and often contains an endonuclease domain that participates in intein mobility (Perler, F. B., Davis, E. O., Dean, G. E., Gimble, F. S., Jack, W. E., Neff, N., Noren, C. J., Thomer, J., Belfort, M. Nucleic Acids Research 1994, 22, 1127-1127). The resulting proteins are linked, however, not expressed as separate proteins. Protein splicing may also be conducted in trans with split inteins expressed on separate polypeptides spontaneously combine to form a single intein which then undergoes the protein splicing process to join to separate proteins.

[0125] The elucidation of the mechanism of protein splicing has led to a number of intein-based applications (Comb, et al., U.S. Pat. No. 5,496,714; Comb, et al., U.S. Pat. No. 5,834,247; Camarero and Muir, J. Amer. Chem. Soc., 121:5597-5598 (1999); Chong, et al., Gene, 192:271-281 (1997), Chong, et al., Nucleic Acids Res., 26:5109-5115 (1998); Chong, et al., J. Biol. Chem., 273:10567-10577 (1998); Cotton, et al. J. Am. Chem. Soc., 121:1100-1101 (1999); Evans, et al., J. Biol. Chem., 274:18359-18363 (1999); Evans, et al., J. Biol. Chem., 274:3923-3926 (1999); Evans, et al., Protein Sci., 7:2256-2264 (1998); Evans, et al., J. Biol. Chem., 275:9091-9094 (2000); Iwai and Pluckthun, FEBS Lett. 459:166-172 (1999); Mathys, et al., Gene, 231:1-13 (1999); Mills, et al., Proc. Natl. Acad. Sci. USA 95:3543-3548 (1998); Muir, et al., Proc. Natl. Acad. Sci. USA 95:6705-6710 (1998); Otomo, et al., Biochemistry 38:16040-16044 (1999); Otomo, et al., J. Biolmol. NMR 14:105-114 (1999); Scott, et al., Proc. Natl. Acad. Sci. USA 96:13638-13643 (1999); Severinov and Muir, J. Biol. Chem., 273:16205-16209 (1998); Shingledecker, et al., Gene, 207:187-195 (1998); Southworth, et al., EMBO J. 17:918-926 (1998); Southworth, et al., Biotechniques, 27:110-120 (1999); Wood, et al., Nat. Biotechnol., 17:889-892 (1999); Wu, et al., Proc. Natl. Acad. Sci. USA 95:9226-9231 (1998a); Wu, et al., Biochim Biophys Acta 1387:422-432 (1998b); Xu, et al., Proc. Natl. Acad. Sci. USA 96:388-393 (1999); Yamazaki, et al., J. Am. Chem. Soc., 120:5591-5592 (1998)). Each reference is incorporated herein by reference.

### Ligand-Dependent Intein

[0126] The term “ligand-dependent intein,” as used herein refers to an intein that comprises a ligand-binding domain. Typically, the ligand-binding domain is inserted into the amino acid sequence of the intein, resulting in a structure intein (N)-ligand-binding domain-intein (C). Typically, ligand-dependent inteins exhibit no or only minimal protein splicing activity in the absence of an appropriate ligand, and a marked increase of protein splicing activity in the presence of the ligand. In some embodiments, the ligand-dependent intein does not exhibit observable splicing activity in the absence of ligand but does exhibit splicing activity in the presence of the ligand. In some embodiments, the ligand-dependent intein exhibits an observable protein splicing activity in the absence of the ligand, and a protein splicing activity in the presence of an appropriate ligand that is at least 5 times, at least 10 times, at least 50 times, at least 100 times, at least 150 times, at least 200 times, at least 250 times, at least 500 times, at least 1000 times, at least 1500 times, at least 2000 times, at least 2500 times, at least 5000 times, at least 10000 times, at least 20000 times, at least 25000 times, at least 50000 times, at least 100000 times, at least 500000 times, or at least 1000000 times greater than the activity observed in the absence of the ligand. In some embodiments, the increase in activity is dose dependent over at least 1 order of magnitude, at least 2 orders of magnitude, at least 3 orders of magnitude, at least 4 orders of magnitude, or at least 5 orders of magnitude, allowing for fine-tuning of intein activity by adjusting the concentration of the ligand. Suitable ligand-dependent inteins are known in the art, and in include those provided below and those described in published U.S. Patent Application U.S. 2014/0065711 A1; Mootz et al., “Protein splicing triggered by a small molecule.” J. Am. Chem. Soc. 2002; 124, 9044-9045; Mootz et al., “Conditional protein splicing: a new tool to control protein structure and function in vitro and in vivo.” J. Am. Chem. Soc. 2003; 125, 10561-10569; Buskirk et al., Proc. Natl. Acad. Sci. USA. 2004; 101, 10505-10510); Skretas & Wood, “Regulation of protein activity with small-molecule-controlled inteins.” Protein Sci. 2005; 14, 523-532; Schwartz, et al., “Post-translational enzyme activation in an animal via optimized conditional protein splicing.” Nat. Chem. Biol. 2007; 3, 50-54; Peck et al., Chem. Biol. 2011; 18 (5), 619-630; the entire contents of each are hereby incorporated by reference. Exemplary sequences are as follows:

| NAME | SEQUENCE OF LIGAND-DEPENDENT INTEIN |
|---|---|
| 2-4 INTEIN: | CLAEGTRIFDPVTGTTHRIEDVVDGRKPIHVVAAAKDGTLLARPVVSWFDQGTRDVIGLRIAGGAIV |
| | WATPDHKVLTEYGWRAAGELRKGDRVAGPGGSGNSLALSLTADQMVSALLDAEPPILYSEYDPTSPF |
| | SEASMMGLLTNLADRELVHMINWAKRVPGFVDLTLHDQAHLLECAWLEILMIGLVWRSMEHPGKLLF |
| | APNLLLDRNQGKCVEGMVEIFDMLLATSSRFRMMNLQGEEFVCLKSIILLNSGVYTFLSSTLKSLEE |
| | KDHIHRALDKITDTLIHLMAKAGLTLQQQHQRLAQLLLILSHIRHMSNKGMEHLYSMKYKNVVPLYD |
| | LLLEMLDAHRLHAGGSGASRVQAFADALDDKFLHDMLAEELRYSVIREVLPTRRARTFDLEVEELHT |
| | LVAEGVVVHNC (SEQ ID NO: 164) |
| 3-2 INTEIN | CLAEGTRIFDPVTGTTHRIEDVVDGRKPIHVVAVAKDGTLLARPVVSWFDQGTRDVIGLRIAGGAIV |
| | WATPDHKVLTEYGWRAAGELRKGDRVAGPGGSGNSLALSLTADQMVSALLDAEPPILYSEYDPTSPF |
| | SEASMMGLLTNLADRELVHMINWAKRVPGFVDLTLHDQAHLLECAWLEILMIGLVWRSMEHPGKLLF |
| | APNLLLDRNQGKCVEGMVEIFDMLLATSSRFRMMNLQGEEFVCLKSIILLNSGVYTFLSSTLKSLEE |
| | KDHIHRALDKITDTLIHLMAKAGLTLQQQHQRLAQLLLILSHIRHMSNKGMEHLYSMKYTNVVPLYD |
| | LLLEMLDAHRLHAGGSGASRVQAFADALDDKFLHDMLAEELRYSVIREVLPTRRARTFDLEVEELHT |
| | LVAEGVVVHNC (SEQ ID NO: 165) |
| 30R3-1 INTEIN | CLAEGTRIFDPVTGTTHRIEDVVDGRKPIHVVAAAKDGTLLARPVVSWFDQGTRDVIGLRIAGGATV |
| | WATPDHKVLTEYGWRAAGELRKGDRVAGPGGSGNSLALSLTADQMVSALLDAEPPIPYSEYDPTSPF |
| | SEASMMGLLTNLADRELVHMINWAKRVPGFVDLTLHDQAHLLECAWLEILMIGLVWRSMEHPGKLLF |
| | APNLLLDRNQGKCVEGMVEIFDMLLATSSRFRMMNLQGEEFVCLKSIILLNSGVYTFLSSTLKSLEE |
| | KDHIHRALDKITDTLIHLMAKAGLTLQQQHQRLAQLLLILSHIRHMSNKGMEHLYSMKYKNVVPLYD |
| | LLLEMLDAHRLHAGGSGASRVQAFADALDDKFLHDMLAEGLRYSVIREVLPTRRARTFDLEVEELHT |
| | LVAEGVVVHNC (SEQ ID NO: 166) |
| 30R3-2 INTEIN | CLAEGTRIFDPVTGTTHRIEDVVDGRKPIHVVAAAKDGTLLARPVVSWFDQGTRDVIGLRIAGGATV |
| | WATPDHKVLTEYGWRAAGELRKGDRVAGPGGSGNSLALSLTADQMVSALLDAEPPILYSEYDPTSPF |
| | SEASMMGLLTNLADRELVHMINWAKRVPGFVDLTLHDQAHLLECAWLEILMIGLVWRSMEHPGKLLF |
| | APNLLLDRNQGKCVEGMVEIFDMLLATSSRFRMMNLQGEEFVCLKSIILLNSGVYTFLSSTLKSLEE |
| | KDHIHRALDKITDTLIHLMAKAGLTLQQQHQRLAQLLLILSHIRHMSNKGMEHLYSMKYKNVVPLYD |
| | LLLEMLDAHRLHAGGSGASRVQAFADALDDKFLHDMLAEELRYSVIREVLPTRRARTFDLEVEELHT |
| | LVAEGVVVHNC (SEQ ID NO: 167) |
| 30R3-3 INTEIN | CLAEGTRIFDPVTGTTHRIEDVVDGRKPIHVVAAAKDGTLLARPVVSWFDQGTRDVIGLRIAGGATV |
| | WATPDHKVLTEYGWRAAGELRKGDRVAGPGGSGNSLALSLTADQMVSALLDAEPPIPYSEYDPTSPF |
| | SEASMMGLLTNLADRELVHMINWAKRVPGFVDLTLHDQAHLLECAWLEILMIGLVWRSMEHPGKLLF |
| | APNLLLDRNQGKCVEGMVEIFDMLLATSSRFRMMNLQGEEFVCLKSIILLNSGVYTFLSSTLKSLEE |
| | KDHIHRALDKITDTLIHLMAKAGLTLQQQHQRLAQLLLILSHIRHMSNKGMEHLYSMKYKNVVPLYD |
| | LLLEMLDAHRLHAGGSGASRVQAFADALDDKFLHDMLAEELRYSVIREVLPTRRARTFDLEVEELHT |
| | LVAEGVVVHNC (SEQ ID NO: 168) |
| 37R3-1 INTEIN | CLAEGTRIFDPVTGTTHRIEDVVDGRKPIHVVAAAKDGTLLARPVVSWFDQGTRDVIGLRIAGGATV |
| | WATPDHKVLTEYGWRAAGELRKGDRVAGPGGSGNSLALSLTADQMVSALLDAEPPILYSEYNPTSPF |
| | SEASMMGLLTNLADRELVHMINWAKRVPGFVDLTLHDQAHLLERAWLEILMIGLVWRSMEHPGKLLF |
| | APNLLLDRNQGKCVEGMVEIFDMLLATSSRFRMMNLQGEEFVCLKSIILLNSGVYTFLSSTLKSLEE |
| | KDHIHRALDKITDTLIHLMAKAGLTLQQQHQRLAQLLLILSHIRHMSNKGMEHLYSMKYKNVVPLYD |
| | LLLEMLDAHRLHAGGSGASRVQAFADALDDKFLHDMLAEGLRYSVIREVLPTRRARTFDLEVEELHT |
| | LVAEGVVVHNC ((SEQ ID NO: 169) |
| 37R3-2 INTEIN | CLAEGTRIFDPVTGTTHRIEDVVDGRKPIHVVAAAKDGTLLARPVVSWFDQGTRDVIGLRIAGGAIV |
| | WATPDHKVLTEYGWRAAGELRKGDRVAGPGGSGNSLALSLTADQMVSALLDAEPPILYSEYDPTSPF |
| | SEASMMGLLTNLADRELVHMINWAKRVPGFVDLTLHDQAHLLERAWLEILMIGLVWRSMEHPGKLLF |
| | APNLLLDRNQGKCVEGMVEIFDMLLATSSRFRMMNLQGEEFVCLKSIILLNSGVYTFLSSTLKSLEE |
| | KDHIHRALDKITDTLIHLMAKAGLTLQQQHQRLAQLLLILSHIRHMSNKGMEHLYSMKYKNVVPLYD |
| | LLLEMLDAHRLHAGGSGASRVQAFADALDDKFLHDMLAEGLRYSVIREVLPTRRARTFDLEVEELHT |
| | LVAEGVVVHNC (SEQ ID NO: 170) |
| 37R3-3 INTEIN | CLAEGTRIFDPVTGTTHRIEDVVDGRKPIHVVAVAKDGTLLARPVVSWFDQGTRDVIGLRIAGGATV |
| | WATPDHKVLTEYGWRAAGELRKGDRVAGPGGSGNSLALSLTADQMVSALLDAEPPILYSEYDPTSPF |
| | SEASMMGLLTNLADRELVHMINWAKRVPGFVDLTLHDQAHLLERAWLEILMIGLVWRSMEHPGKLLF |
| | APNLLLDRNQGKCVEGMVEIFDMLLATSSRFRMMNLQGEEFVCLKSIILLNSGVYTFLSSTLKSLEE |
| | KDHIHRALDKITDTLIHLMAKAGLTLQQQHQRLAQLLLILSHIRHMSNKGMEHLYSMKYKNVVPLYD |
| | LLLEMLDAHRLHAGGSGASRVQAFADALDDKFLHDMLAEELRYSVIREVLPTRRARTFDLEVEELHT |
| | LVAEGVVVHNC (SEQ ID NO: 171) |

### Linker

[0127] The term “linker,” as used herein, refers to a chemical group or a molecule linking two molecules or domains, e.g. dCas9 and a deaminase. Typically, the linker is positioned between, or flanked by, two groups, molecules, or other domains and connected to each one via a covalent bond, thus connecting the two. In some embodiments, the linker is an amino acid or a plurality of amino acids (e.g. a peptide or protein). In some embodiments, the linker is an organic molecule, group, polymer, or chemical domain. Chemical groups include, but are not limited to, disulfide, hydrazone, and azide domains. In some embodiments, the linker is 5-100 amino acids in length, for example, 5, 6, 7, 8, 9, 10, 11, 12, 13, 14, 15, 16, 17, 18, 19, 20, 21, 22, 23, 24, 25, 26, 27, 28, 29, 30, 30-35, 35-40, 40-45, 45-50, 50-60, 60-70, 70-80, 80-90, 90-100, 100-150, or 150-200 amino acids in length. Longer or shorter linkers are also contemplated. In some embodiments, the linker is an XTEN linker. In some embodiments, the linker is a 32-amino acid linker. In other embodiments, the linker is a 30-, 31-, 33- or 34-amino acid linker.

### Mutation

[0128] The term “mutation,” as used herein, refers to a substitution of a residue within a sequence, e.g. a nucleic acid or amino acid sequence, with another residue; a deletion or insertion of one or more residues within a sequence; or a substitution of a residue within a sequence of a genome in a subject to be corrected. Mutations are typically described herein by identifying the original residue followed by the position of the residue within the sequence and by the identity of the newly substituted residue. Various methods for making the amino acid substitutions (mutations) provided herein are well known in the art, and are provided by, for example, Green and Sambrook, Molecular Cloning: A Laboratory Manual (4^{th} ed., Cold Spring Harbor Laboratory Press, Cold Spring Harbor, N.Y. (2012)). Mutations can include a variety of categories, such as single base polymorphisms, microduplication regions, indel, and inversions, and is not meant to be limiting in any way. Mutations can include “loss-of-function” mutations which are mutations that reduce or abolish a protein activity. Most loss-of-function mutations are recessive, because in a heterozygote the second chromosome copy carries an unmutated version of the gene coding for a fully functional protein whose presence compensates for the effect of the mutation. There are some exceptions where a loss-of-function mutation is dominant, one example being haploinsufficiency, where the organism is unable to tolerate the approximately 50% reduction in protein activity suffered by the heterozygote. This is the explanation for a few genetic diseases in humans, including Marfan syndrome, which results from a mutation in the gene for the connective tissue protein called fibrillin. Mutations also embrace “gain-of-function” mutations, which is one which confers an abnormal activity on a protein or cell that is otherwise not present in a normal condition. Many gain-of-function mutations are in regulatory sequences rather than in coding regions, and can therefore have a number of consequences. For example, a mutation might lead to one or more genes being expressed in the wrong tissues, these tissues gaining functions that they normally lack. Alternatively the mutation could lead to overexpression of one or more genes involved in control of the cell cycle, thus leading to uncontrolled cell division and hence to cancer. Because of their nature, gain-of-function mutations are usually dominant.

### On-Target Editing

[0129] The term “on-target editing,” as used herein, refers to the introduction of intended modifications (e.g., deaminations) to nucleotides (e.g., adenine) in a target sequence, such as using the base editors described herein. The term “off-target DNA editing,” as used herein, refers to the introduction of unintended modifications (e.g. deaminations) to nucleotides (e.g. adenine) in a sequence outside the canonical base editor binding window (i.e., from one protospacer position to another, typically 2 to 8 nucleotides long). Off-target DNA editing can result from weak or non-specific binding of the gRNA sequence to the target sequence.

### Off-Target Editing

[0130] The term “off-target editing” or “Cas9-dependent off-target editing” refers to the introduction of unintended modifications that result from weak or non-specific binding of a napDNAbp-gRNA complex (e.g., a complex between a gRNA and the base editor's napDNAbp domain) to nucleic acid sites that have fairly high (e.g. more than 60%, or having fewer than 6 mismatches relative to) sequence identity to a target sequence. In contrast, the term “Cas9-independent off-target editing” refers to the introduction of unintended modifications that result from weak associations of a base editor (e.g., the nucleotide modification domain) to nucleic acid sites that do not have high sequence identity (about 60% or less, or having 6-8 or more mismatches relative to) to a target sequence. Because these associations occur independent of any hybridization between the Cas9-gRNA complex and the relevant nucleic acid site, they are referred to as “Cas9-independent.”

[0131] The term “off-target editing frequency,” as used herein, refers to the number or proportion of unintended base pairs that are edited. On-target and off-target editing frequencies may be measured by the methods and assays described herein, further in view of techniques known in the art, including high-throughput sequencing reads. As used herein, high-throughput sequencing involves the hybridization of nucleic acid primers (e.g., DNA primers) with complementarity to nucleic acid (e.g., DNA) regions just upstream or downstream of the target sequence or off-target sequence of interest. Because the DNA target sequence and the Cas9-independent off-target sequences are known apriori in the methods disclosed herein, nucleic acid primers with sufficient complementarity to regions upstream or downstream of the target sequence and Cas9-independent off-target sequences of interest may be designed using techniques known in the art, such as the PhusionU PCR kit (Life Technologies), Phusion HS II kit (Life Technologies), and Illumina MiSeq kit. Since many of the Cas9-dependent off-target sites have high sequence identity to the target site of interest, nucleic acid primers with sufficient complementarity to regions upstream or downstream of the Cas9-dependent off-target site may likewise be designed using techniques and kits known in the art. These kits make use of polymerase chain reaction (PCR) amplification, which produces amplicons as intermediate products. The target and off-target sequences may comprise genomic loci that further comprise protospacers and PAMs. Accordingly, the term “amplicons,” as used herein, may refer to nucleic acid molecules that constitute the aggregates of genomic loci, protospacers and PAMs. High-throughput sequencing techniques used herein may further include Sanger sequencing and/or whole genome sequencing (WGS).

napDNAbp

[0132] The term “napDNAb” which stand for “nucleic acid programmable DNA binding protein” refers to any protein that may associate (e.g., form a complex) with one or more nucleic acid molecules (i.e., which may broadly be referred to as a “napDNAbp-programming nucleic acid molecule” and includes, for example, guide RNA in the case of Cas systems) which direct or otherwise program the protein to localize to a specific target nucleotide sequence (e.g., a gene locus of a genome) that is complementary to the one or more nucleic acid molecules (or a portion or region thereof) associated with the protein, thereby causing the protein to bind to the nucleotide sequence at the specific target site. This term napDNAbp embraces CRISPR-Cas9 proteins, as well as Cas9 equivalents, homologs, orthologs, or paralogs, whether naturally occurring or non-naturally occurring (e.g., engineered or modified), and may include a Cas9 equivalent from any type of CRISPR system (e.g., type II, V, VI), including Cpf1 (a type-V CRISPR-Cas systems), C2c1 (a type V CRISPR-Cas system), C2c2 (a type VI CRISPR-Cas system), C2c3 (a type V CRISPR-Cas system), dCas9, GeoCas9, CjCas9, Cas12a, Cas12b, Cas12c, Cas12d, Cas12g, Cas12h, Cas12i, Cas13d, Cas14, Argonaute, and nCas9. Further Cas-equivalents are described in Makarova et al., “C2c2 is a single-component programmable RNA-guided RNA-targeting CRISPR effector,” Science 2016; 353 (6299), the contents of which are incorporated herein by reference. However, the nucleic acid programmable DNA binding protein (napDNAbp) that may be used in connection with this invention are not limited to CRISPR-Cas systems. The invention embraces any such programmable protein, such as the Argonaute protein from Natronobacterium gregoryi (NgAgo) which may also be used for DNA-guided genome editing. NgAgo-guide DNA system does not require a PAM sequence or guide RNA molecules, which means genome editing can be performed simply by the expression of generic NgAgo protein and introduction of synthetic oligonucleotides on any genomic sequence. See Gao et al., DNA-guided genome editing using the Natronobacterium gregoryi Argonaute. Nature Biotechnology 2016; 34(7):768-73, which is incorporated herein by reference.

[0133] In some embodiments, the napDNAbp is a RNA-programmable nuclease, when in a complex with an RNA, may be referred to as a nuclease:RNA complex. Typically, the bound RNA(s) is referred to as a guide RNA (gRNA). gRNAs can exist as a complex of two or more RNAs, or as a single RNA molecule. gRNAs that exist as a single RNA molecule may be referred to as single-guide RNAs (sgRNAs), though “gRNA” is used interchangeably to refer to guide RNAs that exist as either single molecules or as a complex of two or more molecules. Typically, gRNAs that exist as single RNA species comprise two domains: (1) a domain that shares homology to a target nucleic acid (e.g., and directs binding of a Cas9 (or equivalent) complex to the target); and (2) a domain that binds a Cas9 protein. In some embodiments, domain (2) corresponds to a sequence known as a tracrRNA, and comprises a stem-loop structure. For example, in some embodiments, domain (2) is homologous to a tracrRNA as depicted in FIG. 1E of Jinek et al., Science 337:816-821(2012), the entire contents of which is incorporated herein by reference. Other examples of gRNAs (e.g., those including domain 2) can be found in U.S. Pat. No. 9,340,799, entitled “mRNA-Sensing Switchable gRNAs,” and International Patent Application No. PCT/US2014/054247, filed Sep. 6, 2013, published as WO 2015/035136 and entitled “Delivery System For Functional Nucleases,” the entire contents of each are herein incorporated by reference. In some embodiments, a gRNA comprises two or more of domains (1) and (2), and may be referred to as an “extended gRNA.” For example, an extended gRNA will, e.g., bind two or more Cas9 proteins and bind a target nucleic acid at two or more distinct regions, as described herein. The gRNA comprises a nucleotide sequence that complements a target site, which mediates binding of the nuclease/RNA complex to said target site, providing the sequence specificity of the nuclease:RNA complex. In some embodiments, the RNA-programmable nuclease is the (CRISPR-associated system) Cas9 endonuclease, for example Cas9 (Csn1) from Streptococcus pyogenes (see, e.g., “Complete genome sequence of an M1 strain of Streptococcus pyogenes.” Ferretti J. J. et al., Proc. Natl. Acad. Sci. U.S.A. 98:4658-4663(2001); “CRISPR RNA maturation by trans-encoded small RNA and host factor RNase III.” Deltcheva E. et al., Nature 471:602-607(2011); and “A programmable dual-RNA-guided DNA endonuclease in adaptive bacterial immunity.” Jinek M. et al., Science 337:816-821(2012), the entire contents of each of which are incorporated herein by reference.

[0134] The napDNAbp nucleases (e.g., Cas9) use RNA:DNA hybridization to target DNA cleavage sites, these proteins are able to be targeted, in principle, to any sequence specified by the guide RNA. Methods of using napDNAbp nucleases, such as Cas9, for site-specific cleavage (e.g., to modify a genome) are known in the art (see e.g., Cong, L. et al. Multiplex genome engineering using CRISPR/Cas systems. Science 339, 819-823 (2013); Mali, P. et al. RNA-guided human genome engineering via Cas9. Science 339, 823-826 (2013); Hwang, W. Y. et al. Efficient genome editing in zebrafish using a CRISPR-Cas system. Nature Biotechnology 31, 227-229 (2013); Jinek, M. et al. RNA-programmed genome editing in human cells. eLife 2, e00471 (2013); Dicarlo, J. E. et al., Genome engineering in Saccharomyces cerevisiae using CRISPR-Cas systems. Nucleic Acid Res. (2013); Jiang, W. et al. RNA-guided editing of bacterial genomes using CRISPR-Cas systems. Nature Biotechnology 31, 233-239 (2013); the entire contents of each of which are incorporated herein by reference).

### Nickase

[0135] The term “nickase” refers to a napDNAbp having only a single nuclease activity that cuts only one strand of a target DNA, rather than both strands. Thus, a nickase type napDNAbp does not leave a double-strand break.

### Nuclear Localization Signal

[0136] A nuclear localization signal or sequence (NLS) is an amino acid sequence that tags, designates, or otherwise marks a protein for import into the cell nucleus by nuclear transport. Typically, this signal consists of one or more short sequences of positively charged lysines or arginines exposed on the protein surface. Different nuclear localized proteins may share the same NLS. An NLS has the opposite function of a nuclear export signal (NES), which targets proteins out of the nucleus. Thus, a single nuclear localization signal can direct the entity with which it is associated to the nucleus of a cell. Such sequences may be of any size and composition, for example more than 25, 25, 15, 12, 10, 8, 7, 6, 5, or 4 amino acids, but will preferably comprise at least a four to eight amino acid sequence known to function as a nuclear localization signal (NLS).

### Nucleic Acid Molecule

[0137] The term “nucleic acid molecule” as used herein, refers to RNA as well as single and/or double-stranded DNA. Nucleic acid molecules may be naturally occurring, for example, in the context of a genome, a transcript, an mRNA, tRNA, rRNA, siRNA, snRNA, a plasmid, cosmid, chromosome, chromatid, or other naturally occurring nucleic acid molecule. On the other hand, a nucleic acid molecule may be a non-naturally occurring molecule, e.g. a recombinant DNA or RNA, an artificial chromosome, an engineered genome, or fragment thereof, or a synthetic DNA, RNA, DNA/RNA hybrid, or including non-naturally occurring nucleotides or nucleosides. Furthermore, the terms “nucleic acid,” “DNA,” “RNA,” and/or similar terms include nucleic acid analogs, e.g. analogs having other than a phosphodiester backbone. Nucleic acids may be purified from natural sources, produced using recombinant expression systems and optionally purified, chemically synthesized, etc. Where appropriate, e.g. in the case of chemically synthesized molecules, nucleic acids may comprise nucleoside analogs such as analogs having chemically modified bases or sugars, and backbone modifications. A nucleic acid sequence is presented in the 5′ to 3′ direction unless otherwise indicated. In some embodiments, a nucleic acid is or comprises natural nucleosides (e.g. adenosine, thymidine, guanosine, cytidine, uridine, deoxyadenosine, deoxythymidine, deoxyguanosine, and deoxycytidine); nucleoside analogs (e.g. 2-aminoadenosine, 2-thiothymidine, inosine, pyrrolo-pyrimidine, 3-methyl adenosine, 5-methylcytidine, 2-aminoadenosine, C5-bromouridine, C5-fluorouridine, C5-iodouridine, C5-propynyl-uridine, C5-propynyl-cytidine, C5-methylcytidine, 2-aminoadenosine, 7-deazaadenosine, 7-deazaguanosine, inosinedenosine, 8-oxoguanosine, O(6)-methylguanine, and 2-thiocytidine); chemically modified bases; biologically modified bases (e.g. methylated bases); intercalated bases; modified sugars (e.g. 2′-fluororibose, ribose, 2′-deoxyribose, arabinose, and hexose); and/or modified phosphate groups (e.g. phosphorothioates and 5′-N-phosphoramidite linkages).

### PACE

[0138] The term “phage-assisted continuous evolution (PACE),” as used herein, refers to continuous evolution that employs phage as viral vectors. The general concept of PACE technology has been described, for example, in International PCT Application, PCT/US2009/056194, filed Sep. 8, 2009, published as WO 2010/028347 on Mar. 11, 2010; International PCT Application, PCT/US2011/066747, filed Dec. 22, 2011, published as WO 2012/088381 on Jun. 28, 2012; U.S. application, U.S. Pat. No. 9,023,594, issued May 5, 2015, International PCT Application, PCT/US2015/012022, filed Jan. 20, 2015, published as WO 2015/134121 on Sep. 11, 2015, and International PCT Application, PCT/US2016/027795, filed Apr. 15, 2016, published as WO 2016/168631 on Oct. 20, 2016, the entire contents of each of which are incorporated herein by reference.

### Promoter

[0139] The term “promoter” is art-recognized and refers to a nucleic acid molecule with a sequence recognized by the cellular transcription machinery and able to initiate transcription of a downstream gene. A promoter may be constitutively active, meaning that the promoter is always active in a given cellular context, or conditionally active, meaning that the promoter is only active in the presence of a specific condition. For example, a conditional promoter may only be active in the presence of a specific protein that connects a protein associated with a regulatory element in the promoter to the basic transcriptional machinery, or only in the absence of an inhibitory molecule. A subclass of conditionally active promoters is inducible promoters that require the presence of a small molecule “inducer” for activity. Examples of inducible promoters include, but are not limited to, arabinose-inducible promoters, Tet-on promoters, and tamoxifen-inducible promoters. A variety of constitutive, conditional, and inducible promoters are well known to the skilled artisan, and the skilled artisan will be able to ascertain a variety of such promoters useful in carrying out the instant invention, which is not limited in this respect. In various embodiments, the disclosure provides vectors with appropriate promoters for driving expression of the nucleic acid sequences encoding the fusion proteins (or one or more individual components thereof).

### Protein, Peptide, and Polypeptide

[0140] The terms “protein,” “peptide,” and “polypeptide” are used interchangeably herein, and refer to a polymer of amino acid residues linked together by peptide (amide) bonds. The terms refer to a protein, peptide, or polypeptide of any size, structure, or function. Typically, a protein, peptide, or polypeptide will be at least three amino acids long. A protein, peptide, or polypeptide may refer to an individual protein or a collection of proteins. One or more of the amino acids in a protein, peptide, or polypeptide may be modified, for example, by the addition of a chemical entity such as a carbohydrate group, a hydroxyl group, a phosphate group, a farnesyl group, an isofarnesyl group, a fatty acid group, a linker for conjugation, functionalization, or other modification, etc. A protein, peptide, or polypeptide may also be a single molecule or may be a multi-molecular complex. A protein, peptide, or polypeptide may be just a fragment of a naturally occurring protein or peptide. A protein, peptide, or polypeptide may be naturally occurring, recombinant, or synthetic, or any combination thereof. The term “fusion protein” as used herein refers to a hybrid polypeptide which comprises protein domains from at least two different proteins. One protein may be located at the amino-terminal (N-terminal) portion of the fusion protein or at the carboxy-terminal (C-terminal) protein thus forming an “amino-terminal fusion protein” or a “carboxy-terminal fusion protein,” respectively. A protein may comprise different domains, for example, a nucleic acid binding domain (e.g., the gRNA binding domain of Cas9 that directs the binding of the protein to a target site) and a nucleic acid cleavage domain or a catalytic domain of a recombinase. In some embodiments, a protein comprises a proteinaceous part, e.g., an amino acid sequence constituting a nucleic acid binding domain, and an organic compound, e.g., a compound that can act as a nucleic acid cleavage agent. In some embodiments, a protein is in a complex with, or is in association with, a nucleic acid, e.g., RNA. Any of the proteins provided herein may be produced by any method known in the art. For example, the proteins provided herein may be produced via recombinant protein expression and purification, which is especially suited for fusion proteins comprising a peptide linker. Methods for recombinant protein expression and purification are well known, and include those described by Green and Sambrook, Molecular Cloning: A Laboratory Manual (4th ed., Cold Spring Harbor Laboratory Press, Cold Spring Harbor, N.Y. (2012)), the entire contents of which are incorporated herein by reference. It should be appreciated that the disclosure provides any of the polypeptide sequences provided herein without an N-terminal methionine (M) residue.

### RNA-Protein Recruitment System

[0141] In various embodiments, two separate protein domains (e.g., a Cas9 domain and a cytidine deaminase domain) may be colocalized to one another to form a functional complex (akin to the function of a fusion protein comprising the two separate protein domains) by using an “RNA-protein recruitment system,” such as the “MS2 tagging technique.” Such systems generally tag one protein domain with an “RNA-protein interaction domain” (aka “RNA-protein recruitment domain”) and the other with an “RNA-binding protein” that specifically recognizes and binds to the RNA-protein interaction domain, e.g., a specific hairpin structure. These types of systems can be leveraged to colocalize the domains of a base editor, as well as to recruitment additional functionalities to a base editor, such as a UGI domain. In one example, the MS2 tagging technique is based on the natural interaction of the MS2 bacteriophage coat protein (“MCP” or “MS2cp”) with a stem-loop or hairpin structure present in the genome of the phage, i.e., the “MS2 hairpin.” In the case of the MS2 hairpin, it is recognized and bound by the MS2 bacteriophage coat protein (MCP). Thus, in one exemplary scenario a deaminase-MS2 fusion can recruit a Cas9-MCP fusion.

[0142] A review of other modular RNA-protein interaction domains are described in the art, for example, in Johansson et al., “RNA recognition by the MS2 phage coat protein,” Sem Virol., 1997, Vol. 8(3): 176-185; Delebecque et al., “Organization of intracellular reactions with rationally designed RNA assemblies,” Science, 2011, Vol. 333: 470-474; Mali et al., “Cas9 transcriptional activators for target specificity screening and paired nickases for cooperative genome engineering,” Nat. Biotechnol., 2013, Vol. 31: 833-838; and Zalatan et al., “Engineering complex synthetic transcriptional programs with CRISPR RNA scaffolds,” Cell, 2015, Vol. 160: 339-350, each of which are incorporated herein by reference in their entireties. Other systems include the PP7 hairpin, which specifically recruits the PCP protein, and the “com” hairpin, which specifically recruits the Com protein. See Zalatan et al.

[0143] The nucleotide sequence of the MS2 hairpin (or equivalently referred to as the “MS2 aptamer”) is: GCCAACATGAGGATCACCCATGTCTGCAGGGCC (SEQ ID NO: 172).

[0144] The amino acid sequence of the MCP or MS2cp is:

(SEQ ID NO: 173)
GSASNFTQFVLVDNGGTGDVTVAPSNFANGVAEWISSNSRSQAYKVTCSV
RQSSAQNRKYTIKVEVPKVATQTVGGEELPVAGWRSYLNMELTIPIFATN
SDCELIVKAMQGLLKDGNPIPSAIAANSGIY.

### Sense Strand

[0145] In genetics, a “sense” strand is the segment within double-stranded DNA that runs from 5′ to 3′, and which is complementary to the antisense strand of DNA, or template strand, which runs from 3′ to 5′. In the case of a DNA segment that encodes a protein, the sense strand is the strand of DNA that has the same sequence as the mRNA, which takes the antisense strand as its template during transcription, and eventually undergoes (typically, not always) translation into a protein. The antisense strand is thus responsible for the RNA that is later translated to protein, while the sense strand possesses a nearly identical makeup to that of the mRNA. Note that for each segment of dsDNA, there will possibly be two sets of sense and antisense, depending on which direction one reads (since sense and antisense is relative to perspective). It is ultimately the gene product, or mRNA, that dictates which strand of one segment of dsDNA is referred to as sense or antisense.

[0146] In the context of a PEgRNA, the first step is the synthesis of a single-strand complementary DNA (i.e., the 3′ ssDNA flap, which becomes incorporated) oriented in the 5′ to 3′ direction which is templated off of the PEgRNA extension arm. Whether the 3′ ssDNA flap should be regarded as a sense or antisense strand depends on the direction of transcription since it well accepted that both strands of DNA may serve as a template for transcription (but not at the same time). Thus, in some embodiments, the 3′ ssDNA flap (which overall runs in the 5′ to 3′ direction) will serve as the sense strand because it is the coding strand. In other embodiments, the 3′ ssDNA flap (which overall runs in the 5′ to 3′ direction) will serve as the antisense strand and thus, the template for transcription.

### Subject

[0147] The term “subject,” as used herein, refers to an individual organism, for example, an individual mammal. In some embodiments, the subject is a human. In some embodiments, the subject is a non-human mammal. In some embodiments, the subject is a non-human primate. In some embodiments, the subject is a rodent. In some embodiments, the subject is a sheep, a goat, a cattle, a cat, or a dog. In some embodiments, the subject is a vertebrate, an amphibian, a reptile, a fish, an insect, a fly, or a nematode. In some embodiments, the subject is a research animal. In some embodiments, the subject is genetically engineered, e.g., a genetically engineered non-human subject. The subject may be of either sex and at any stage of development.

### Target Site

[0148] The term “target site” refers to a sequence within a nucleic acid molecule that is edited by a fusion protein (e.g. a dCas9-deaminase fusion protein provided herein). The target site further refers to the sequence within a nucleic acid molecule to which a complex of the fusion protein and gRNA binds.

### Transcription Terminator

[0149] A “transcriptional terminator” is a nucleic acid sequence that causes transcription to stop. A transcriptional terminator may be unidirectional or bidirectional. It is comprised of a DNA sequence involved in specific termination of an RNA transcript by an RNA polymerase. A transcriptional terminator sequence prevents transcriptional activation of downstream nucleic acid sequences by upstream promoters. A transcriptional terminator may be necessary in vivo to achieve desirable expression levels or to avoid transcription of certain sequences. A transcriptional terminator is considered to be “operably linked to” a nucleotide sequence when it is able to terminate the transcription of the sequence it is linked to.

[0150] The most commonly used type of terminator is a forward terminator. When placed downstream of a nucleic acid sequence that is usually transcribed, a forward transcriptional terminator will cause transcription to abort. In some embodiments, bidirectional transcriptional terminators are provided, which usually cause transcription to terminate on both the forward and reverse strand. In some embodiments, reverse transcriptional terminators are provided, which usually terminate transcription on the reverse strand only.

[0151] In prokaryotic systems, terminators usually fall into two categories (1) rho-independent terminators and (2) rho-dependent terminators. Rho-independent terminators are generally composed of palindromic sequence that forms a stem loop rich in G-C base pairs followed by several T bases. Without wishing to be bound by theory, the conventional model of transcriptional termination is that the stem loop causes RNA polymerase to pause, and transcription of the poly-A tail causes the RNA:DNA duplex to unwind and dissociate from RNA polymerase.

[0152] In eukaryotic systems, the terminator region may comprise specific DNA sequences that permit site-specific cleavage of the new transcript so as to expose a polyadenylation site. This signals a specialized endogenous polymerase to add a stretch of about 200 A residues (polyA) to the 3′ end of the transcript. RNA molecules modified with this polyA tail appear to more stable and are translated more efficiently. Thus, in some embodiments involving eukaryotes, a terminator may comprise a signal for the cleavage of the RNA. In some embodiments, the terminator signal promotes polyadenylation of the message. The terminator and/or polyadenylation site elements may serve to enhance output nucleic acid levels and/or to minimize read through between nucleic acids.

[0153] Terminators for use in accordance with the present disclosure include any terminator of transcription described herein or known to one of ordinary skill in the art. Examples of terminators include, without limitation, the termination sequences of genes such as, for example, the bovine growth hormone terminator, and viral termination sequences such as, for example, the SV40 terminator, spy, yejM, secG-leuU, thrLABC, rrnB T1, hisLGDCBHAFI, metZWV, rrnC, xapR, aspA and arcA terminator. In some embodiments, the termination signal may be a sequence that cannot be transcribed or translated, such as those resulting from a sequence truncation.

### Transition

[0154] As used herein, “transitions” refer to the interchange of purine nucleobases (A↔G) or the interchange of pyrimidine nucleobases (C↔T). This class of interchanges involves nucleobases of similar shape. The compositions and methods disclosed herein are capable of inducing one or more transitions in a target DNA molecule. The compositions and methods disclosed herein are also capable of inducing both transitions and transversion in the same target DNA molecule. These changes involve A↔G, G↔A, C↔T, or T↔C. In the context of a double-strand DNA with Watson-Crick paired nucleobases, transversions refer to the following base pair exchanges: A:T↔G:C, G:G↔A:T, C:G↔T:A, or T:A↔C:G. The compositions and methods disclosed herein are capable of inducing one or more transitions in a target DNA molecule. The compositions and methods disclosed herein are also capable of inducing both transitions and transversion in the same target DNA molecule, as well as other nucleotide changes, including deletions and insertions.

### Transversion

[0155] As used herein, “transversions” refer to the interchange of purine nucleobases for pyrimidine nucleobases, or in the reverse and thus, involve the interchange of nucleobases with dissimilar shape. These changes involve T↔A, T↔G, C↔G, C↔A, A↔T, A↔C, G↔C, and G↔T. In the context of a double-strand DNA with Watson-Crick paired nucleobases, transversions refer to the following base pair exchanges: T:A↔A:T, T:A↔G:C, C:G↔G:C, C:G↔A:T, A:T↔T:A, A:T↔C:G, G:C↔C:G, and G:C↔T:A. The compositions and methods disclosed herein are capable of inducing one or more transversions in a target DNA molecule. The compositions and methods disclosed herein are also capable of inducing both transitions and transversion in the same target DNA molecule, as well as other nucleotide changes, including deletions and insertions.

### Treatment

[0156] The terms “treatment,” “treat,” and “treating,” refer to a clinical intervention aimed to reverse, alleviate, delay the onset of, or inhibit the progress of a disease or disorder, or one or more symptoms thereof, as described herein. As used herein, the terms “treatment,” “treat,” and “treating” refer to a clinical intervention aimed to reverse, alleviate, delay the onset of, or inhibit the progress of a disease or disorder, or one or more symptoms thereof, as described herein. In some embodiments, treatment may be administered after one or more symptoms have developed and/or after a disease has been diagnosed. In other embodiments, treatment may be administered in the absence of symptoms, e.g., to prevent or delay onset of a symptom or inhibit onset or progression of a disease. For example, treatment may be administered to a susceptible individual prior to the onset of symptoms (e.g., in light of a history of symptoms and/or in light of genetic or other susceptibility factors). Treatment may also be continued after symptoms have resolved, for example, to prevent or delay their recurrence.

### Upstream

[0157] As used herein, the terms “upstream” and “downstream” are terms of relativety that define the linear position of at least two elements located in a nucleic acid molecule (whether single or double-stranded) that is orientated in a 5′-to-3′ direction. In particular, a first element is upstream of a second element in a nucleic acid molecule where the first element is positioned somewhere that is 5′ to the second element. For example, a SNP is upstream of a Cas9-induced nick site if the SNP is on the 5′ side of the nick site. Conversely, a first element is downstream of a second element in a nucleic acid molecule where the first element is positioned somewhere that is 3′ to the second element. For example, a SNP is downstream of a Cas9-induced nick site if the SNP is on the 3′ side of the nick site. The nucleic acid molecule can be a DNA (double or single stranded). RNA (double or single stranded), or a hybrid of DNA and RNA. The analysis is the same for single strand nucleic acid molecule and a double strand molecule since the terms upstream and downstream are in reference to only a single strand of a nucleic acid molecule, except that one needs to select which strand of the double stranded molecule is being considered. Often, the strand of a double stranded DNA which can be used to determine the positional relativity of at least two elements is the “sense” or “coding” strand. In genetics, a “sense” strand is the segment within double-stranded DNA that runs from 5′ to 3′, and which is complementary to the antisense strand of DNA, or template strand, which runs from 3′ to 5′. Thus, as an example, a SNP nucleobase is “downstream” of a promoter sequence in a genomic DNA (which is double-stranded) if the SNP nucleobase is on the 3′ side of the promoter on the sense or coding strand.

### Uracil Glycosylase Inhibitor

[0158] The term “uracil glycosylase inhibitor” or “UGI,” as used herein, refers to a protein that is capable of inhibiting a uracil-DNA glycosylase base-excision repair enzyme. In some embodiments, a UGI domain comprises a wild-type UGI or a UGI as set forth in SEQ ID NO: 163. In some embodiments, the UGI proteins provided herein include fragments of UGI and proteins homologous to a UGI or a UGI fragment. For example, in some embodiments, a UGI domain comprises a fragment of the amino acid sequence set forth in SEQ ID NO: 163. In some embodiments, a UGI fragment comprises an amino acid sequence that comprises at least 60%, at least 65%, at least 70%, at least 75%, at least 80%, at least 85%, at least 90%, at least 95%, at least 96%, at least 97%, at least 98%, at least 99%, or at least 99.5% of the amino acid sequence as set forth in SEQ ID NO: 163. In some embodiments, a UGI comprises an amino acid sequence homologous to the amino acid sequence set forth in SEQ ID NO: 163, or an amino acid sequence homologous to a fragment of the amino acid sequence set forth in SEQ ID NO: 163. In some embodiments, proteins comprising UGI or fragments of UGI or homologs of UGI or UGI fragments are referred to as “UGI variants.” A UGI variant shares homology to UGI, or a fragment thereof. For example a UGI variant is at least 70% identical, at least 75% identical, at least 80% identical, at least 85% identical, at least 90% identical, at least 95% identical, at least 96% identical, at least 97% identical, at least 98% identical, at least 99% identical, at least 99.5% identical, or at least 99.9% identical to a wild type UGI or a UGI as set forth in SEQ ID NO: 163. In some embodiments, the UGI variant comprises a fragment of UGI, such that the fragment is at least 70% identical, at least 80% identical, at least 90% identical, at least 95% identical, at least 96% identical, at least 97% identical, at least 98% identical, at least 99% identical, at least 99.5% identical, or at least 99.9% to the corresponding fragment of wild-type UGI or a UGI as set forth in SEQ ID NO: 163. In some embodiments, the UGI comprises the following amino acid sequence:

(SEQ ID NO: 163)
MTNLSDIIEKETGKQLVIQESILMLPEEVEEVIGNKPESDILVHTAYDES
TDENVMLLTSDAPEYKPWALVIQDSNGENKIKML
(P14739|UNGI_BPPB2 Uracil-DNA glycosylase
inhibitor).

### Variant

[0159] As used herein, the term “variant” refers to a protein having characteristics that deviate from what occurs in nature that retains at least one functional i.e. binding, interaction, or enzymatic ability and/or therapeutic property thereof. A “variant” is at least about 70% identical, at least about 80% identical, at least about 90% identical, at least about 95% identical, at least about 96% identical, at least about 97% identical, at least about 98% identical, at least about 99% identical, at least about 99.5% identical, or at least about 99.9% identical to the wild type protein. For instance, a variant of Cas9 may comprise a Cas9 that has one or more changes in amino acid residues as compared to a wild type Cas9 amino acid sequence. As another example, a variant of a deaminase may comprise a deaminase that has one or more changes in amino acid residues as compared to a wild type deaminase amino acid sequence, e.g. following ancestral sequence reconstruction of the deaminase. These changes include chemical modifications, including substitutions of different amino acid residues truncations, covalent additions (e.g. of a tag), and any other mutations. The term also encompasses circular permutants, mutants, truncations, or domains of a reference sequence, and which display the same or substantially the same functional activity or activities as the reference sequence. This term also embraces fragments of a wild type protein.

[0160] The level or degree of which the property is retained may be reduced relative to the wild type protein but is typically the same or similar in kind. Generally, variants are overall very similar, and in many regions, identical to the amino acid sequence of the protein described herein. A skilled artisan will appreciate how to make and use variants that maintain all, or at least some, of a functional ability or property.

[0161] The variant proteins may comprise, or alternatively consist of, an amino acid sequence which is at least 80%, 85%, 90%, 95%, 96%, 97%, 98%, 99%, or 100%, identical to, for example, the amino acid sequence of a wild-type protein, or any protein provided herein (e.g. SMN protein).

[0162] By a polypeptide having an amino acid sequence at least, for example, 95% “identical” to a query amino acid sequence, it is intended that the amino acid sequence of the subject polypeptide is identical to the query sequence except that the subject polypeptide sequence may include up to five amino acid alterations per each 100 amino acids of the query amino acid sequence. In other words, to obtain a polypeptide having an amino acid sequence at least 95% identical to a query amino acid sequence, up to 5% of the amino acid residues in the subject sequence may be inserted, deleted, or substituted with another amino acid. These alterations of the reference sequence may occur at the amino- or carboxy-terminal positions of the reference amino acid sequence or anywhere between those terminal positions, interspersed either individually among residues in the reference sequence or in one or more contiguous groups within the reference sequence.

[0163] As a practical matter, whether any particular polypeptide is at least 80%, 85%, 90%, 95%, 96%, 97%, 98%, or 99% identical to, for instance, the amino acid sequence of a protein such as a SMN protein, can be determined conventionally using known computer programs. A preferred method for determining the best overall match between a query sequence (a sequence of the present invention) and a subject sequence, also referred to as a global sequence alignment, can be determined using the FASTDB computer program based on the algorithm of Brutlag et al. (Comp. App. Biosci. 6:237-245 (1990)). In a sequence alignment the query and subject sequences are either both nucleotide sequences or both amino acid sequences. The result of said global sequence alignment is expressed as percent identity. Preferred parameters used in a FASTDB amino acid alignment are: Matrix=PAM 0, k-tuple=2, Mismatch Penalty=1, Joining Penalty=20, Randomization Group Length=0, Cutoff Score=1, Window Size=sequence length, Gap Penalty=5, Gap Size Penalty=0.05, Window Size=500 or the length of the subject amino acid sequence, whichever is shorter.

[0164] If the subject sequence is shorter than the query sequence due to N- or C-terminal deletions, not because of internal deletions, a manual correction must be made to the results. This is because the FASTDB program does not account for N- and C-terminal truncations of the subject sequence when calculating global percent identity. For subject sequences truncated at the N- and C-termini, relative to the query sequence, the percent identity is corrected by calculating the number of residues of the query sequence that are N- and C-terminal of the subject sequence, which are not matched/aligned with a corresponding subject residue, as a percent of the total bases of the query sequence. Whether a residue is matched/aligned is determined by results of the FASTDB sequence alignment. This percentage is then subtracted from the percent identity, calculated by the above FASTDB program using the specified parameters, to arrive at a final percent identity score. This final percent identity score is what is used for the purposes of the present invention. Only residues to the N- and C-termini of the subject sequence, which are not matched/aligned with the query sequence, are considered for the purposes of manually adjusting the percent identity score. That is, only query residue positions outside the farthest N- and C-terminal residues of the subject sequence.

### Vector

[0165] The term “vector,” as used herein, refers to a nucleic acid that can be modified to encode a gene of interest and that is able to enter into a host cell, mutate and replicate within the host cell, and then transfer a replicated form of the vector into another host cell. Exemplary suitable vectors include viral vectors, such as retroviral vectors or bacteriophages and filamentous phage, and conjugative plasmids. Additional suitable vectors will be apparent to those of skill in the art based on the instant disclosure.

### Wild Type

[0166] As used herein the term “wild type” is a term of the art understood by skilled persons and means the typical form of an organism, strain, gene or characteristic as it occurs in nature as distinguished from mutant or variant forms.

[0167] These and other exemplary substituents are described in more detail in the Detailed Description, Examples, and claims.

### DETAILED DESCRIPTION OF CERTAIN EMBODIMENTS

[0168] The present disclosure provides a novel machine learning algorithm capable of assisting those of ordinary skill in the art to conduct base editing by, inter alia, facilitating the selection of an appropriate guide RNA and base editor combination which are capable of conducting base editing at a certain level of efficiency and specificity on a given input target DNA sequence desired to be edited to produce an outcome genotype of interest. The novel machine learning algorithm described and claimed herein can be referred to as “BE-Hive.” The disclosure further provides a graphical user interface that implements BE-Hive, allowing a user to input various features, including a desired target DNA sequence, an appropriate guide RNA (or associated CRISPR protospacer), a base editor, and a cell in which base editing is to take place, and to predict base editing efficiencies and bystander editing patterns for the selected features.

[0169] The utility of base editing has inspired the development of many cytosine and adenine base editor variants with distinct editing properties (Adli, 2018; Molla and Yang, 2019; Rees and Liu, 2018). To date, these properties have been gleaned by analyzing base editing outcomes at a modest number of genomic sites, often chosen to align with previous genome editing studies (Gaudelli et al., 2017; Gehrke et al., 2018; Huang et al., 2019; Komor et al., 2016; Thuronyi et al., 2019). The interplay between base editor and target sequence, however, influences base editing outcomes in complex and occasionally unintuitive ways (Gehrke et al., 2018; Huang et al., 2019; Tan et al., 2019; Thuronyi et al., 2019; Villiger et al., 2018). As a result, obtaining a desired genotype with useful efficiencies often requires empirical optimization of base editor and single guide RNA (sgRNA) choice for each target. Likewise, some viable targets that do not fit canonical guidelines for base editing use may be overlooked since simple guidelines for target selection likely do not fully capture the scope of base editing. A systematic and comprehensive analysis of sequence and deaminase determinants of base editing thus would enhance the understanding of base editors, facilitate their use in precision editing applications, and guide development of new base editors with enhanced abilities to induce or prevent rare base editing outcomes.

[0170] As described herein in certain embodiments, libraries of 38,538 total pairs of sgRNAs and target sequences were developed and integrated into three mammalian cell types to comprehensively characterize base editing outcomes and sequence-activity relationships for eight popular cytosine and adenine base editors in living cells. The roles of deaminases, sequence context, and cell type in determining genotypes that result from base editing were analyzed, and a machine learning algorithm was developed that accurately predicts base editing outcomes, including many previously unpredictable features, at any target site of interest. Using the resulting information, a variety of base editors were applied, including newly engineered variants, to precisely correct 3,388 genotypes and 2,399 coding sequences of disease-associated SNVs to wild-type with ≥90% precision among edited products, including by previously poorly understood non-canonical base editing outcomes. The herein disclosed and claimed machine learning algorithm facilitates the selection of an appropriate guide RNA and base editor combination which are capable of conducting base editing at a certain level of efficiency and specificity on a given input target DNA sequence desired to be edited to produce an outcome genotype of interest.

[0171] In various aspects, the instant specification describes machine learning algorithms for selecting guide RNAs for base editing based on a particular base editor and other determinants of base editing, which include, but are not limited to the choice of the napDNAbp of the base editing system; the choice of the deaminase of the base editing system; the nucleotide sequence; the target genomic location; the transcriptional state of the target genomic location; locus-dependent activity of the choice napDNAbp; cell-type; transcriptional state of DNA repair proteins; and base editor modifications. The disclosure also provides machine learning algorithms for predicting genotype outcomes based on a particular base editor and other determinants of base editing, which include, but are not limited to the choice of the napDNAbp of the base editing system; the choice of the deaminase of the base editing system; the nucleotide sequence; the target genomic location; the transcriptional state of the target genomic location; locus-dependent activity of the choice napDNAbp; cell-type; transcriptional state of DNA repair proteins; and base editor modifications. The disclosure further provides base editors (e.g., ABEs and CBEs), napDNAbps, cytidine deaminases, adenosine deaminases, nucleic acid sequences encoding base editors and components thereof, vectors, and cells. In addition, the disclosure provides methods of making biological or experimental training and/or validation data for training and/or validating the machine learning computational models, as well as, vectors, libraries, and nucleic acid sequences for use in obtaining said experimental training and/or validation data, as well as the experimental training data and/or validation data itself.

[0172] The machine learning algorithm considers various inputs, including the sequence of the target DNA sequence to be edited, the napDNAbp options, the deaminase options, the guide RNA options, the spacer and/or protospacer sequence associated with the RNA options, dinucleotide composition at neighboring positions in the protospacers, guide RNA melting temperatures, and the total number of G, C, A, and/or T nucleotides in the protospacer sequence, among other features. In addition, other features that may be considered as input to the machine learning algorithm. Such features may include, but are not limited to, the transcriptional state of the target genomic location, cell-type in which the base editing is taking place, transcriptional state of the target DNA being edited, and any epigenetic modifications of the target DNA being edited.

[0173] The disclosure further provides base editors (e.g., ABEs and CBEs), napDNAbps, cytidine deaminases, adenosine deaminases, nucleic acid sequences encoding base editors and/or guide RNAs, vectors, and cells. In other aspects, the disclosure provides guide RNA sequences (and/or spacer sequences or protospacer sequences associated therewith) that can be selected and/or identified by the machine learning algorithm described herein, as well as compositions comprising said guide RNA sequences and a base editor for editing a target DNA sequence (e.g., correcting a point mutation). In addition, the disclosure provides methods of making biological or experimental training and/or validation data for training and/or validating the machine learning algorithms described herein, as well as, vectors, libraries, and nucleic acid sequences for use in obtaining said experimental training and/or validation data, as well as the experimental training data and/or validation data itself.

[0174] In one aspect, the disclosure provides a method of using at least one machine learning model to identify a guide RNA for use in a base editing system for introducing a target change into a nucleotide sequence, the base editing system comprising a napDNAbp and a deaminase, the method comprising using software executing on at least one computer hardware processor to perform: obtaining input data indicative of the nucleotide sequence and a set of one or more guide RNAs; generating first input features from the input data; applying a first machine learning model to the first input features to obtain first output data indicative, for each one guide RNA in the set of guide RNAs, of a base editing efficiency, at one or multiple locations in the nucleotide sequence, of the base editing system when using the each one guide RNA; generating second input features from the input data; applying a second machine learning model to the second input features to obtain second output data indicative, for each one guide RNA in the set of guide RNAs, of bystander editing activity, at one or multiple locations in the nucleotide sequence, by the base editing system when using the each one guide RNA; and identifying, using the first output data and the second output data, the guide RNA for use in the base editing system for introducing the target change into the nucleotide sequence.

[0175] In certain embodiments, the set of guide RNAs includes a first guide RNA, and wherein, the input data includes first data indicative of at least a part of a nucleotide sequence associated with the first guide RNA.

[0176] The first data can specify a spacer or a protospacer sequence associated with the first guide RNA.

[0177] The step of obtaining the data indicative of the nucleotide sequence and the set of guide RNAs, can comprise: obtaining, by the software and from at least one source external to the software, the data indicative of the nucleotide sequence and the set of guide RNAs.

[0178] The step of obtaining the data indicative of the nucleotide sequence and the set of guide RNAs, comprises: obtaining, by the software and from at least one source external to the software, first data indicative of the nucleotide sequence; and generating, from the first data indicative of the nucleotide sequence, data indicative of the set of guide RNAs.

[0179] In certain embodiments, the first machine learning model comprises a non-linear machine learning model selected from the group consisting of a random forest model, a logistic regression model, a support vector machine model, a generalized linear model, a hierarchical Bayesian model, and neural network model.

[0180] In other embodiments, the first machine learning model can comprise a random forest model.

[0181] The set of guide RNAs can include a first guide RNA, and wherein generating the first input features comprises generating multiple features to include in the first input features, the multiple features including: features encoding at least some nucleotides in a protospacer sequence or spacer sequence associated with the first guide RNA; and features encoding at least some nucleotides, in the nucleotide sequence, located within a threshold number of nucleotides of the protospacer sequence associated with the first guide RNA.

[0182] The step of generating the features encoding the at least some nucleotides in the protospacer sequence comprises generating a one-hot encoding of the at least some nucleotides in the protospacer sequence.

[0183] In various embodiments, the multiple features further include one or more of the following features: features encoding at least some dinucleotides at neighboring positions in the protospacer sequence; features representing melting temperature of the first guide RNA; one or more features representing a total number of G, C, A, and/or T nucleotides in the protospacer sequence; and a feature representing an average base editing efficiency of the base editing system.

[0184] In certain embodiments, the set of guide RNAs includes a first guide RNA, wherein the first output data is indicative of a fraction of sequence reads containing at least one base edit at any nucleotide in a target window about a protospacer sequence associated with the first guide RNA, among all sequence reads.

[0185] In other embodiments, the second first machine learning model comprises a non-linear machine learning model selected from the group consisting of a random forest model, a logistic regression model, a support vector machine model, a generalized linear model, a hierarchical Bayesian model, and neural network model.

[0186] In yet other embodiments, the second machine learning model comprises a deep neural network model.

[0187] The neural network model can comprise a conditional autoregressive neural network model.

[0188] The conditional autoregressive neural network model can include: an encoder neural network mapping input data to a latent representation; and a decoder neural network mapping the latent representation to output data, wherein the decoder neural network has an autoregressive structure.

[0189] The encoder neural network can comprise a multi-layer fully connected network with residual connections.

[0190] The decoder neural network can generate a distribution over base editing outcomes at each nucleotide while conditioning on previously-generated outcomes.

[0191] The neural network model can include parameters representing a position-wise bias toward producing an unedited outcome.

[0192] The set of guide RNAs can include a first guide RNA, and wherein generating the second input features can comprise generating multiple features to include in the second input features, the multiple features including: features encoding at least some nucleotides in a protospacer sequence or spacer sequence associated with the first guide RNA; and features encoding at least some nucleotides, in the nucleotide sequence, located within a threshold number of nucleotides of the protospacer sequence associated with the first guide RNA.

[0193] In other embodiments, the second output data can be indicative of frequencies of occurrence of base editing outcomes each of which includes edits to nucleotides at multiple positions.

[0194] The second output data can be indicative of a frequency distribution on combinations of base editing outcomes.

[0195] In various embodiments, the set of guide RNAs can include a first guide RNA, wherein, for a specific combination of base edits, the second output data is indicative of a frequency of occurrence of the specific combination of base edits among all sequenced reads containing at least one base edit at any nucleotide in a target window about a protospacer sequence associated with the first guide RNA.

[0196] In other embodiments, the set of guide RNAs can include a first guide RNA, wherein the first output data includes a first base editing efficiency value for the first guide RNA, wherein the second output data includes a first bystander editing value for the first guide RNA, and wherein identifying the guide RNA using the first output data and the second output data, comprises multiplying the first base editing efficiency value by the first bystander editing value.

[0197] In certain embodiments, the first machine learning model comprises a first plurality of values for a respective first plurality of parameters, the first plurality of values used by the at least one computer hardware processor to obtain the first output data from the first input features.

[0198] The first plurality of parameters can comprise at least one thousand parameters.

[0199] The first plurality of parameters can comprise between one thousand and ten thousand parameters.

[0200] In various embodiments, the first machine learning model can comprise a random forest model comprising at least 100 decision trees, each of the at least 100 decision trees having at least a depth of D, and wherein processing the input data using the random forest model comprises performing 100*D comparisons.

[0201] The random forest model can comprise at least 500 decision trees.

[0202] In certain embodiments, depth of D can be greater than or equal to five, wherein processing the input data using the random forest model comprises performing at least 2500 comparisons.

[0203] In other embodiments, the second machine learning model can comprise a second plurality of values for a respective second plurality of parameters, the second plurality of values used by the at least one computer hardware processor to obtain the second output data from the second input features.

[0204] The second plurality of parameters can comprise at least ten thousand parameters, or between 25,000 and 100,000 parameters, or between 30,000 and 40,000 parameters.

[0205] In other embodiments, the disclosure provides a method of manufacturing the identified guide RNA for use in the base editing system for introducing the target change into the nucleotide sequence.

[0206] In other aspects, the disclosure provides a method for training the first machine learning model of any of the above aspects comprising: (i) preparing a library comprising a plurality of nucleic acid molecules each encoding a nucleotide target sequence and a cognate guide RNA; (ii) introducing the library into a plurality of host cells; (iii) contacting the library in the host cells with a Cas-based genome editing system to produce a plurality of genomic repair products; (iv) determining the sequences of the genomic repair products; and (v) training the first machine learning model with training data that comprises at least the sequences of the genomic repair products and the cognate guide RNA.

[0207] In still other embodiments, the disclosure provides a method for training the second machine learning model of any of the above aspects comprising: (i) preparing a library comprising a plurality of nucleic acid molecules each encoding a nucleotide target sequence and a cognate guide RNA; (ii) introducing the library into a plurality of host cells; (iii) contacting the library in the host cells with a Cas-based genome editing system to produce a plurality of genomic repair products; (iv) determining the sequences of the genomic repair products; and (v) training the second machine learning model with training data that comprises at least the sequences of the genomic repair products and the cognate guide RNA.

[0208] The disclosure also provides for a computer readable storage medium storing processor executable instructions that, when executed by at least one computer hardware processor, cause the at least one computer hardware processor to perform a method of using at least one machine learning model to identify a guide RNA for use in a base editing system for introducing a target change into a nucleotide sequence, the base editing system comprising a napDNAbp and a deaminase, the method comprising: obtaining input data indicative of the nucleotide sequence and a set of one or more guide RNAs; generating first input features from the input data; applying a first machine learning model to the first input features to obtain first output data indicative, for each one guide RNA in the set of guide RNAs, of a base editing efficiency, at one or multiple locations in the nucleotide sequence, of the base editing system when using the each one guide RNA; generating second input features from the input data; applying a second machine learning model to the second input features to obtain second output data indicative, for each one guide RNA in the set of guide RNAs, of bystander editing activity, at one or multiple locations in the nucleotide sequence, by the base editing system when using the each one guide RNA; and identifying, using the first output data and the second output data, the guide RNA for use in the base editing system for introducing the target change into the nucleotide sequence.

[0209] In another aspect, the disclosure provides a system comprising: at least one computer hardware processor; and at least one computer readable storage medium storing processor executable instructions that, when executed by the at least one computer hardware processor, cause the at least one computer hardware processor to perform a method of using at least one machine learning model to identify a guide RNA for use in a base editing system for introducing a target change into a nucleotide sequence, the base editing system comprising a napDNAbp and a deaminase, the method comprising: obtaining input data indicative of the nucleotide sequence and a set of one or more guide RNAs; generating first input features from the input data; applying a first machine learning model to the first input features to obtain first output data indicative, for each one guide RNA in the set of guide RNAs, of a base editing efficiency, at one or multiple locations in the nucleotide sequence, of the base editing system when using the each one guide RNA; generating second input features from the input data; applying a second machine learning model to the second input features to obtain second output data indicative, for each one guide RNA in the set of guide RNAs, of bystander editing activity, at one or multiple locations in the nucleotide sequence, by the base editing system when using the each one guide RNA; and identifying, using the first output data and the second output data, the guide RNA for use in the base editing system for introducing the target change into the nucleotide sequence.

[0210] In other aspects, the machine learning model can be based solely on the base editing efficiency machine learning model, for example, a method identifying a guide RNA for use in a base editing system for introducing a target change into a nucleotide sequence, the base editing system comprising a napDNAbp and a deaminase, the method comprising: using software executing on at least one computer hardware processor to perform: obtaining input data indicative of the nucleotide sequence and a set of one or more guide RNAs; generating first input features from the input data; applying a first machine learning model to the first input features to obtain first output data indicative, for each one guide RNA in the set of guide RNAs, of a base editing efficiency, at one or multiple locations in the nucleotide sequence, of the base editing system when using the each one guide RNA; and identifying, using the first output data, the guide RNA for use in the base editing system for introducing the target change into the nucleotide sequence.

[0211] Nevertheless, in such aspects, the machine learning model can further comprise a bystander model, comprising generating second input features from the input data; applying a second machine learning model to the second input features to obtain second output data indicative, for each one guide RNA in the set of guide RNAs, of bystander editing activity, at one or multiple locations in the nucleotide sequence, by the base editing system when using the each one guide RNA, wherein identifying the guide RNA is performed using the first output data and the second output data.

[0212] The disclosure also provides at least one computer readable storage medium storing processor executable instructions that, when executed by at least one computer hardware processor, cause the at least one computer hardware processor to perform a method of identifying a guide RNA for use in a base editing system for introducing a target change into a nucleotide sequence, the base editing system comprising a napDNAbp and a deaminase, the method comprising: obtaining input data indicative of the nucleotide sequence and a set of one or more guide RNAs; generating first input features from the input data; applying a first machine learning model to the first input features to obtain first output data indicative, for each one guide RNA in the set of guide RNAs, of a base editing efficiency, at one or multiple locations in the nucleotide sequence, of the base editing system when using the each one guide RNA; and identifying, using the first output data, the guide RNA for use in the base editing system for introducing the target change into the nucleotide sequence.

[0213] In other aspects, the disclosure provides a system, comprising: at least one computer hardware processor; and at least one computer readable storage medium storing processor executable instructions that, when executed by the at least one computer hardware processor, cause the at least one computer hardware processor to perform a method of identifying a guide RNA for use in a base editing system for introducing a target change into a nucleotide sequence, the base editing system comprising a napDNAbp and a deaminase, the method comprising: obtaining input data indicative of the nucleotide sequence and a set of one or more guide RNAs; generating first input features from the input data; applying a first machine learning model to the first input features to obtain first output data indicative, for each one guide RNA in the set of guide RNAs, of a base editing efficiency, at one or multiple locations in the nucleotide sequence, of the base editing system when using the each one guide RNA; and identifying, using the first output data, the guide RNA for use in the base editing system for introducing the target change into the nucleotide sequence.

[0214] In other aspects, the machine learning model can be based solely on the bystander machine learning model, comprising a method of identifying a guide RNA for use in a base editing system for introducing a target change into a nucleotide sequence, the base editing system comprising a napDNAbp and a deaminase, the method comprising: using software executing on at least one computer hardware processor to perform: obtaining input data indicative of the nucleotide sequence and a set of one or more guide RNAs; generating first input features from the input data; applying a first machine learning model to the first input features to obtain first output data indicative, for each one guide RNA in the set of guide RNAs, of bystander editing activity, at one or multiple locations in the nucleotide sequence, by the base editing system when using the each one guide RNA; and identifying, using the first output data, the guide RNA for use in the base editing system for introducing the target change into the nucleotide sequence.

[0215] Such a method may further comprise an efficiency machine learning model, comprising generating second input features from the input data; applying a second machine learning model to the second input features to obtain second output data indicative, for each one guide RNA in the set of guide RNAs, of a base editing efficiency, at one or multiple locations in the nucleotide sequence, of the base editing system when using the each one guide RNA, wherein identifying the guide RNA is performed using the first output data and the second output data.

[0216] In other aspects, the disclosure provides at least one computer readable storage medium storing processor executable instructions that, when executed by at least one computer hardware processor, cause the at least one computer hardware processor to perform a method of identifying a guide RNA for use in a base editing system for introducing a target change into a nucleotide sequence, the base editing system comprising a napDNAbp and a deaminase, the method comprising: obtaining input data indicative of the nucleotide sequence and a set of one or more guide RNAs; generating first input features from the input data; applying a first machine learning model to the first input features to obtain first output data indicative, for each one guide RNA in the set of guide RNAs, of bystander editing activity, at one or multiple locations in the nucleotide sequence, by the base editing system when using the each one guide RNA; and identifying, using the first output data, the guide RNA for use in the base editing system for introducing the target change into the nucleotide sequence.

[0217] In still other aspects, the disclosure provides a system, comprising: at least one computer hardware processor; and at least one computer readable storage medium storing processor executable instructions that, when executed by at least one computer hardware processor, cause the at least one computer hardware processor to perform a method of identifying a guide RNA for use in a base editing system for introducing a target change into a nucleotide sequence, the base editing system comprising a napDNAbp and a deaminase, the method comprising: obtaining input data indicative of the nucleotide sequence and a set of one or more guide RNAs; generating first input features from the input data; applying a first machine learning model to the first input features to obtain first output data indicative, for each one guide RNA in the set of guide RNAs, of bystander editing activity, at one or multiple locations in the nucleotide sequence, by the base editing system when using the each one guide RNA; and identifying, using the first output data, the guide RNA for use in the base editing system for introducing the target change into the nucleotide sequence.

[0218] In other aspects, the disclosure provides a method, comprising: using software executing on at least one computer hardware processor to perform: receiving input data indicative of a selection of: a nucleotide sequence; a base editing system comprising a napDNAbp and a deaminase; and a first guide RNA; applying a first machine learning model to the first input features, generated from the input data, to obtain first output data indicative of a base editing efficiency, at a target location in the nucleotide sequence, of the base editing system when using the first guide RNA; applying a second machine learning model to the second input features, generated from the input data, to obtain second output data indicative of bystander editing activity, at one or multiple locations in the nucleotide sequence, by the base editing system when using the first guide RNA; and determining, using the first output data and the second output data, a likelihood of whether the first guide RNA and the base editing system, when used in combination, will result in introduce a target change to the nucleotide sequence in a cell.

[0219] The disclosure also provides at least one computer-readable storage medium storing processor-executable instructions that, when executed by at least one computer hardware processor, cause the at least one computer processor to perform: receiving input data indicative of a selection of: a nucleotide sequence; a base editing system comprising a napDNAbp and a deaminase; and a first guide RNA; applying a first machine learning model to the first input features, generated from the input data, to obtain first output data indicative of a base editing efficiency, at a target location in the nucleotide sequence, of the base editing system when using the first guide RNA; applying a second machine learning model to the second input features, generated from the input data, to obtain second output data indicative of bystander editing activity, at one or multiple locations in the nucleotide sequence, by the base editing system when using the first guide RNA; and determining, using the first output data and the second output data, a likelihood of whether the first guide RNA and the base editing system, when used in combination, will result in introduce a target change to the nucleotide sequence in a cell.

[0220] In other aspects, the disclosure provides a system, comprising: at least one computer hardware processor; and at least one computer-readable storage medium storing processor-executable instructions that, when executed by the at least one computer hardware processor, cause the at least one computer processor to perform: receiving input data indicative of a selection of: a nucleotide sequence; a base editing system comprising a napDNAbp and a deaminase; and a first guide RNA; applying a first machine learning model to the first input features, generated from the input data, to obtain first output data indicative of a base editing efficiency, at a target location in the nucleotide sequence, of the base editing system when using the first guide RNA; applying a second machine learning model to the second input features, generated from the input data, to obtain second output data indicative of bystander editing activity, at one or multiple locations in the nucleotide sequence, by the base editing system when using the first guide RNA; and determining, using the first output data and the second output data, a likelihood of whether the first guide RNA and the base editing system, when used in combination, will result in introduce a target change to the nucleotide sequence in a cell.

[0221] Accordingly, the present disclosure relates, at least to, but not limited by, the following numbered aspects:
[0222] 1. A computational method of selecting a guide RNA for use in a base editing system comprising a napDNAbp and a deaminase, said base editing system being capable of introducing a genetic change into a nucleotide sequence of a target genomic location to achieve a goal genotype outcome, the method comprising:
   [0223] (a) accessing first data indicative of:
      [0224] the goal genotype outcome; and
      [0225] a plurality of sets of candidate base editing determinates;
   [0226] (b) processing the first data using a first computational model to determine second data indicative of a base editing efficiency at the target genomic location for each set of candidate base editing determinates;
   [0227] (c) processing the first data using a second computational model to determine third data indicative of a bystander precision for each set of candidate base editing determinates; and
   [0228] (d) analyzing the second data and third data to identify a guide RNA capable of achieving the goal genotype outcome.
[0229] 2. The computational method of aspect 1, wherein the base editing system comprises a base editor that comprises a fusion protein.
[0230] 3. The computational method of aspect 2, wherein the fusion protein comprises a nucleic acid programmable DNA binding protein (napDNAbp) coupled to a deaminase.
[0231] 4. The computational method of aspect 3, wherein the deaminase is a cytidine deaminase.
[0232] 5. The computational method of aspect 3, wherein the deaminase is a adenosine deaminase.
[0233] 6. The computational method of aspect 4, wherein the cytidine deaminase comprises an amino acid sequence selected from the group consisting of: SEQ ID NOs: 92-134, or a polypeptide having an amino acid sequence having at least 85% sequence identity with SEQ ID NOs: 92-134.
[0234] 7. The computational method of aspect 5, wherein the adenosine deaminase comprises an amino acid sequence selected from the group consisting of: SEQ ID NOs: 78-91, or a polypeptide having an amino acid sequence having at least 85% sequence identity with SEQ ID NOs: 78-91.
[0235] 8. The computational method of aspect 3, wherein the napDNAbp is a Cas9 domain.
[0236] 9. The computational method of aspect 8, wherein the Cas9 domain comprises an amino acid sequence selected from the group consisting of: SEQ ID NOs: 5, 8, 10, 12, and 13-77, or a polypeptide having an amino acid sequence having at least 85% sequence identity with SEQ ID NOs: 5, 8, 10, 12, and 13-77.
[0237] 10. The computational method of aspect 2, wherein the fusion protein comprises an amino acid sequence selected from the group consisting of: SEQ ID NOs: 174-222, 463-476, or 223-248, or a polypeptide having an amino acid sequence having at least 85% sequence identity with SEQ ID NOs: 174-222, 463-476, or 223-248.
[0238] 11. The computational method of aspect 1, wherein the base editing determinates comprise one or more of:
   [0239] (i) the choice of the napDNAbp of the base editing system;
   [0240] (ii) the choice of the deaminase of the base editing system;
   [0241] (iii) the nucleotide sequence;
   [0242] (iv) the target genomic location;
   [0243] (v) the transcriptional state of the target genomic location;
   [0244] (vi) locus-dependent activity of the choice napDNAbp;
   [0245] (vii) cell-type;
   [0246] (viii) transcriptional state of DNA repair proteins; or
   [0247] (ix) base editor modifications.
[0248] 12. The method of aspect 1, wherein the genetic change is to a genetic mutation.
[0249] 13. The method of aspect 12, wherein the genetic mutation is a single-nucleotide polymorphism, a deletion mutation, an insertion mutation, or a microduplication error.
[0250] 14. The method of aspect 12, wherein the genetic mutation causes a disease or a risk of a disease.
[0251] 15. The method of aspect 14, wherein the disease is a monogenic disease.
[0252] 16. The method of aspect 15, wherein the monogenic disease is sickle cell disease, cystic fibrosis, polycystic kidney disease, Tay-Sachs disease, achondroplasia, beta-thalassemia, Hurler syndrome, severe combined immunodeficiency, hemophilia, glycogen storage disease Ia, and Duchenne muscular dystrophy.
[0253] 17. The method of aspect 1, wherein the first and second computational models are deep learning computational models.
[0254] 18. The method of aspect 1, wherein the first and second computational models are neural network models having one or more hidden layers.
[0255] 19. The method of aspect 1, wherein the computational model is trained with experimental base editing data.
[0256] 20. A method of introducing a goal genotype outcome in the genome of a cell with a desired base editing system comprising:
   [0257] (i) selecting a guide RNA for use in the desired base editing system in accordance with the method of any of aspects 1-19; and
   [0258] (ii) contacting the genome of the cell with the guide RNA and the desired base editing system, thereby introducing the goal genotype outcome.
[0259] 21. The method of aspect 20, wherein the method is conducted ex vivo, in vivo, or ex vivo.
[0260] 22. The method of aspect 1, wherein the goal genotype outcome restores the function of a gene.
[0261] 23. The method of aspect 1, wherein the goal genotype outcome restores the function of a disease-causing mutation.
[0262] 24. A library for training the computational method of aspect 1, comprising a plurality of vectors each comprising a first nucleotide sequence of a target genomic location having a target site to be edited, and a second nucleotide sequence encoding a cognate guide RNA capable of directing the base editing system to carry out base editing at the target genomic location to achieve the goal genotype outcome.
[0263] 25. A method for training a computational model of any of aspects 1-23, comprising: (i) preparing a library comprising a plurality of nucleic acid molecules each encoding a nucleotide target sequence and a cognate guide RNA; (ii) introducing the library into a plurality of host cells; (iii) contacting the library in the host cells with a Cas-based genome editing system to produce a plurality of genomic repair products; (iv) determining the sequences of the genomic repair products; and (iv) training the computational model with input data that comprises at least the sequences of the genomic repair products and the cognate guide RNA.

[0264] I. Machine Learning Algorithm for Base Editing (BE-Hive)

[0265] The present disclosure provides a novel machine learning algorithm capable of assisting those of ordinary skill in the art to conduct base editing by, inter alia, facilitating the selection of an appropriate guide RNA and base editor combination which are capable of conducting base editing at a certain level of efficiency and specificity on a given input target DNA sequence desired to be edited to produce an outcome genotype of interest. The novel machine learning algorithm described and claimed herein can be referred to as “BE-Hive.” The disclosure further provides a graphical user interface that implements BE-Hive, allowing a user to input various features, including a desired target DNA sequence, an appropriate guide RNA (or associated CRISPR protospacer), a base editor, and a cell in which base editing is to take place, and to predict base editing efficiencies and bystander editing patterns for the selected features.

[0266] In various aspects, the instant specification describes machine learning algorithms for selecting guide RNAs for base editing based on a particular base editor and other determinants of base editing, which include, but are not limited to the choice of the napDNAbp of the base editing system; the choice of the deaminase of the base editing system; the nucleotide sequence; the target genomic location; the transcriptional state of the target genomic location; locus-dependent activity of the choice napDNAbp; cell-type; transcriptional state of DNA repair proteins; and base editor modifications. The disclosure also provides machine learning algorithms for predicting genotype outcomes based on a particular base editor and other determinants of base editing, which include, but are not limited to the choice of the napDNAbp of the base editing system; the choice of the deaminase of the base editing system; the nucleotide sequence; the target genomic location; the transcriptional state of the target genomic location; locus-dependent activity of the choice napDNAbp; cell-type; transcriptional state of DNA repair proteins; and base editor modifications. The disclosure further provides base editors (e.g., ABEs and CBEs), napDNAbps, cytidine deaminases, adenosine deaminases, nucleic acid sequences encoding base editors and components thereof, vectors, and cells. In addition, the disclosure provides methods of making biological or experimental training and/or validation data for training and/or validating the machine learning computational models, as well as, vectors, libraries, and nucleic acid sequences for use in obtaining said experimental training and/or validation data, as well as the experimental training data and/or validation data itself.

[0267] The machine learning algorithm considers various inputs, including the sequence of the target DNA sequence to be edited, the napDNAbp options, the deaminase options, the guide RNA options, the spacer and/or protospacer sequence associated with the RNA options, dinucleotide composition at neighboring positions in the protospacers, guide RNA melting temperatures, and the total number of G, C, A, and/or T nucleotides in the protospacer sequence, among other features. In addition, other features that may be considered as input to the machine learning algorithm. Such features may include, but are not limited to, the transcriptional state of the target genomic location, cell-type in which the base editing is taking place, transcriptional state of the target DNA being edited, and any epigenetic modifications of the target DNA being edited.

[0268] The disclosure further provides base editors (e.g., ABEs and CBEs), napDNAbps, cytidine deaminases, adenosine deaminases, nucleic acid sequences encoding base editors and/or guide RNAs, vectors, and cells. In other aspects, the disclosure provides guide RNA sequences (and/or spacer sequences or protospacer sequences associated therewith) that can be selected and/or identified by the machine learning algorithm described herein, as well as compositions comprising said guide RNA sequences and a base editor for editing a target DNA sequence (e.g., correcting a point mutation). In addition, the disclosure provides methods of making biological or experimental training and/or validation data for training and/or validating the machine learning algorithms described herein, as well as, vectors, libraries, and nucleic acid sequences for use in obtaining said experimental training and/or validation data, as well as the experimental training data and/or validation data itself.

[0269] In one aspect, the disclosure provides a method of using at least one machine learning model to identify a guide RNA for use in a base editing system for introducing a target change into a nucleotide sequence, the base editing system comprising a napDNAbp and a deaminase, the method comprising: using software executing on at least one computer hardware processor to perform: obtaining input data indicative of the nucleotide sequence and a set of one or more guide RNAs; generating first input features from the input data; applying a first machine learning model to the first input features to obtain first output data indicative, for each one guide RNA in the set of guide RNAs, of a base editing efficiency, at one or multiple locations in the nucleotide sequence, of the base editing system when using the each one guide RNA; generating second input features from the input data; applying a second machine learning model to the second input features to obtain second output data indicative, for each one guide RNA in the set of guide RNAs, of bystander editing activity, at one or multiple locations in the nucleotide sequence, by the base editing system when using the each one guide RNA; and identifying, using the first output data and the second output data, the guide RNA for use in the base editing system for introducing the target change into the nucleotide sequence.

[0270] In certain embodiments, the set of guide RNAs includes a first guide RNA, and wherein, the input data includes first data indicative of at least a part of a nucleotide sequence associated with the first guide RNA.

[0271] The first data can specify a spacer or a protospacer sequence associated with the first guide RNA.

[0272] The step of obtaining the data indicative of the nucleotide sequence and the set of guide RNAs, can comprise: obtaining, by the software and from at least one source external to the software, the data indicative of the nucleotide sequence and the set of guide RNAs.

[0273] The step of obtaining the data indicative of the nucleotide sequence and the set of guide RNAs, comprises: obtaining, by the software and from at least one source external to the software, first data indicative of the nucleotide sequence; and generating, from the first data indicative of the nucleotide sequence, data indicative of the set of guide RNAs.

[0274] In certain embodiments, the first machine learning model comprises a non-linear machine learning model selected from the group consisting of a random forest model, a logistic regression model, a support vector machine model, a generalized linear model, a hierarchical Bayesian model, and neural network model.

[0275] In other embodiments, the first machine learning model can comprise a random forest model.

[0276] The set of guide RNAs can include a first guide RNA, and wherein generating the first input features comprises generating multiple features to include in the first input features, the multiple features including: features encoding at least some nucleotides in a protospacer sequence or spacer sequence associated with the first guide RNA; and features encoding at least some nucleotides, in the nucleotide sequence, located within a threshold number of nucleotides of the protospacer sequence associated with the first guide RNA.

[0277] The step of generating the features encoding the at least some nucleotides in the protospacer sequence comprises generating a one-hot encoding of the at least some nucleotides in the protospacer sequence.

[0278] In various embodiments, the multiple features further include one or more of the following features: features encoding at least some dinucleotides at neighboring positions in the protospacer sequence; features representing melting temperature of the first guide RNA; one or more features representing a total number of G, C, A, and/or T nucleotides in the protospacer sequence; and a feature representing an average base editing efficiency of the base editing system.

[0279] In certain embodiments, the set of guide RNAs includes a first guide RNA, wherein the first output data is indicative of a fraction of sequence reads containing at least one base edit at any nucleotide in a target window about a protospacer sequence associated with the first guide RNA, among all sequence reads.

[0280] In other embodiments, the second first machine learning model comprises a non-linear machine learning model selected from the group consisting of a random forest model, a logistic regression model, a support vector machine model, a generalized linear model, a hierarchical Bayesian model, and neural network model.

[0281] In yet other embodiments, the second machine learning model comprises a deep neural network model.

[0282] The neural network model can comprise a conditional autoregressive neural network model.

[0283] The conditional autoregressive neural network model can include: an encoder neural network mapping input data to a latent representation; and a decoder neural network mapping the latent representation to output data, wherein the decoder neural network has an autoregressive structure.

[0284] The encoder neural network can comprise a multi-layer fully connected network with residual connections.

[0285] The decoder neural network can generate a distribution over base editing outcomes at each nucleotide while conditioning on previously-generated outcomes.

[0286] The neural network model can include parameters representing a position-wise bias toward producing an unedited outcome.

[0287] The set of guide RNAs can include a first guide RNA, and wherein generating the second input features can comprise generating multiple features to include in the second input features, the multiple features including: features encoding at least some nucleotides in a protospacer sequence or spacer sequence associated with the first guide RNA; and features encoding at least some nucleotides, in the nucleotide sequence, located within a threshold number of nucleotides of the protospacer sequence associated with the first guide RNA.

[0288] In other embodiments, the second output data can be indicative of frequencies of occurrence of base editing outcomes each of which includes edits to nucleotides at multiple positions.

[0289] The second output data can be indicative of a frequency distribution on combinations of base editing outcomes. In various embodiments, the set of guide RNAs can include a first guide RNA, wherein, for a specific combination of base edits, the second output data is indicative of a frequency of occurrence of the specific combination of base edits among all sequenced reads containing at least one base edit at any nucleotide in a target window about a protospacer sequence associated with the first guide RNA.

[0290] In other embodiments, the set of guide RNAs can include a first guide RNA, wherein the first output data includes a first base editing efficiency value for the first guide RNA, wherein the second output data includes a first bystander editing value for the first guide RNA, and wherein identifying the guide RNA using the first output data and the second output data, comprises multiplying the first base editing efficiency value by the first bystander editing value.

[0291] In certain embodiments, the first machine learning model comprises a first plurality of values for a respective first plurality of parameters, the first plurality of values used by the at least one computer hardware processor to obtain the first output data from the first input features.

[0292] The first plurality of parameters can comprise at least one thousand parameters. The first plurality of parameters can comprise between one thousand and ten thousand parameters. In various embodiments, the first machine learning model can comprise a random forest model comprising at least 100 decision trees, each of the at least 100 decision trees having at least a depth of D, and wherein processing the input data using the random forest model comprises performing 100*D comparisons. The random forest model can comprise at least 500 decision trees. In certain embodiments, depth of D can be greater than or equal to five, wherein processing the input data using the random forest model comprises performing at least 2500 comparisons.

[0293] In other embodiments, the second machine learning model can comprise a second plurality of values for a respective second plurality of parameters, the second plurality of values used by the at least one computer hardware processor to obtain the second output data from the second input features.

[0294] The second plurality of parameters can comprise at least ten thousand parameters, or between 25,000 and 100,000 parameters, or between 30,000 and 40,000 parameters.

[0295] In other embodiments, the disclosure provides a method of manufacturing the identified guide RNA for use in the base editing system for introducing the target change into the nucleotide sequence.

[0296] In other aspects, the disclosure provides a method for training the first machine learning model of any of the above aspects comprising: (i) preparing a library comprising a plurality of nucleic acid molecules each encoding a nucleotide target sequence and a cognate guide RNA; (ii) introducing the library into a plurality of host cells; (iii) contacting the library in the host cells with a Cas-based genome editing system to produce a plurality of genomic repair products; (iv) determining the sequences of the genomic repair products; and (v) training the first machine learning model with training data that comprises at least the sequences of the genomic repair products and the cognate guide RNA.

[0297] In still other embodiments, the disclosure provides a method for training the second machine learning model of any of the above aspects comprising: (i) preparing a library comprising a plurality of nucleic acid molecules each encoding a nucleotide target sequence and a cognate guide RNA; (ii) introducing the library into a plurality of host cells; (iii) contacting the library in the host cells with a Cas-based genome editing system to produce a plurality of genomic repair products; (iv) determining the sequences of the genomic repair products; and (v) training the second machine learning model with training data that comprises at least the sequences of the genomic repair products and the cognate guide RNA.

[0298] The disclosure also provides for a computer readable storage medium storing processor executable instructions that, when executed by at least one computer hardware processor, cause the at least one computer hardware processor to perform a method of using at least one machine learning model to identify a guide RNA for use in a base editing system for introducing a target change into a nucleotide sequence, the base editing system comprising a napDNAbp and a deaminase, the method comprising: obtaining input data indicative of the nucleotide sequence and a set of one or more guide RNAs; generating first input features from the input data; applying a first machine learning model to the first input features to obtain first output data indicative, for each one guide RNA in the set of guide RNAs, of a base editing efficiency, at one or multiple locations in the nucleotide sequence, of the base editing system when using the each one guide RNA; generating second input features from the input data; applying a second machine learning model to the second input features to obtain second output data indicative, for each one guide RNA in the set of guide RNAs, of bystander editing activity, at one or multiple locations in the nucleotide sequence, by the base editing system when using the each one guide RNA; and identifying, using the first output data and the second output data, the guide RNA for use in the base editing system for introducing the target change into the nucleotide sequence.

[0299] In another aspect, the disclosure provides a system comprising: at least one computer hardware processor; and at least one computer readable storage medium storing processor executable instructions that, when executed by the at least one computer hardware processor, cause the at least one computer hardware processor to perform a method of using at least one machine learning model to identify a guide RNA for use in a base editing system for introducing a target change into a nucleotide sequence, the base editing system comprising a napDNAbp and a deaminase, the method comprising: obtaining input data indicative of the nucleotide sequence and a set of one or more guide RNAs; generating first input features from the input data; applying a first machine learning model to the first input features to obtain first output data indicative, for each one guide RNA in the set of guide RNAs, of a base editing efficiency, at one or multiple locations in the nucleotide sequence, of the base editing system when using the each one guide RNA; generating second input features from the input data; applying a second machine learning model to the second input features to obtain second output data indicative, for each one guide RNA in the set of guide RNAs, of bystander editing activity, at one or multiple locations in the nucleotide sequence, by the base editing system when using the each one guide RNA; and identifying, using the first output data and the second output data, the guide RNA for use in the base editing system for introducing the target change into the nucleotide sequence.

[0300] In other aspects, the disclosure provides a method, comprising: using software executing on at least one computer hardware processor to perform: receiving input data indicative of a selection of: a nucleotide sequence; a base editing system comprising a napDNAbp and a deaminase; and a first guide RNA; applying a first machine learning model to the first input features, generated from the input data, to obtain first output data indicative of a base editing efficiency, at a target location in the nucleotide sequence, of the base editing system when using the first guide RNA; applying a second machine learning model to the second input features, generated from the input data, to obtain second output data indicative of bystander editing activity, at one or multiple locations in the nucleotide sequence, by the base editing system when using the first guide RNA; and determining, using the first output data and the second output data, a likelihood of whether the first guide RNA and the base editing system, when used in combination, will result in introduce a target change to the nucleotide sequence in a cell.

[0301] The disclosure also provides at least one computer-readable storage medium storing processor-executable instructions that, when executed by at least one computer hardware processor, cause the at least one computer processor to perform: receiving input data indicative of a selection of: a nucleotide sequence; a base editing system comprising a napDNAbp and a deaminase; and a first guide RNA; applying a first machine learning model to the first input features, generated from the input data, to obtain first output data indicative of a base editing efficiency, at a target location in the nucleotide sequence, of the base editing system when using the first guide RNA; applying a second machine learning model to the second input features, generated from the input data, to obtain second output data indicative of bystander editing activity, at one or multiple locations in the nucleotide sequence, by the base editing system when using the first guide RNA; and determining, using the first output data and the second output data, a likelihood of whether the first guide RNA and the base editing system, when used in combination, will result in introduce a target change to the nucleotide sequence in a cell.

[0302] In other aspects, the disclosure provides a system, comprising: at least one computer hardware processor; and at least one computer-readable storage medium storing processor-executable instructions that, when executed by the at least one computer hardware processor, cause the at least one computer processor to perform: receiving input data indicative of a selection of: a nucleotide sequence; a base editing system comprising a napDNAbp and a deaminase; and a first guide RNA; applying a first machine learning model to the first input features, generated from the input data, to obtain first output data indicative of a base editing efficiency, at a target location in the nucleotide sequence, of the base editing system when using the first guide RNA; applying a second machine learning model to the second input features, generated from the input data, to obtain second output data indicative of bystander editing activity, at one or multiple locations in the nucleotide sequence, by the base editing system when using the first guide RNA; and determining, using the first output data and the second output data, a likelihood of whether the first guide RNA and the base editing system, when used in combination, will result in introduce a target change to the nucleotide sequence in a cell.

[0303] In one aspect, the present disclosure provides a machine learning algorithm capable of assisting those of ordinary skill in the art to conduct base editing by, inter alia, facilitating the selection of an appropriate guide RNA and base editor combination which are capable of conducting base editing at a certain level of efficiency and specificity on a given input target DNA sequence desired to be edited to produce an outcome genotype of interest. The machine learning algorithm considers various inputs, including the sequence of the target DNA sequence to be edited, the napDNAbp options, the deaminase options, the guide RNA options, the spacer and/or protospacer sequence associated with the RNA options, dinucleotide composition at neighboring positions in the protospacers, guide RNA melting temperatures, and the total number of G, C, A, and/or T nucleotides in the protospacer sequence, among other features. In addition, other features that may be considered as input to the machine learning algorithm. Such features may include, but are not limited to, the transcriptional state of the target genomic location, cell-type in which the base editing is taking place, transcriptional state of the target DNA being edited, and any epigenetic modifications of the target DNA being edited.

[0304] The disclosure further provides a graphical user interface that implements BE-Hive, allowing a user to input various features, including a desired target DNA sequence, an appropriate guide RNA (or associated CRISPR protospacer), a base editor, and a cell in which base editing is to take place, and to predict base editing efficiencies and bystander editing patterns for the selected features.

[0305] In certain embodiments, the disclosure provides machine learning computational models for selecting guide RNAs for base editing based on a particular base editor and other determinants of base editing, which include, but are not limited to the choice of the napDNAbp of the base editing system; the choice of the deaminase of the base editing system; the nucleotide sequence; the target genomic location; the transcriptional state of the target genomic location; locus-dependent activity of the choice napDNAbp; cell-type; transcriptional state of DNA repair proteins; and base editor modifications. The disclosure also provides machine learning computational models for predicting genotype outcomes based on a particular base editor and other determinants of base editing, which include, but are not limited to the choice of the napDNAbp of the base editing system; the choice of the deaminase of the base editing system; the nucleotide sequence; the target genomic location; the transcriptional state of the target genomic location; locus-dependent activity of the choice napDNAbp; cell-type; transcriptional state of DNA repair proteins; and base editor modifications. The disclosure further provides base editors (e.g., ABEs and CBEs), napDNAbps, cytidine deaminases, adenosine deaminases, nucleic acid sequences encoding base editors and components thereof, vectors, and cells. In addition, the disclosure provides methods of making biological or experimental training and/or validation data for training and/or validating the machine learning computational models, as well as, vectors, libraries, and nucleic acid sequences for use in obtaining said experimental training and/or validation data, as well as the experimental training data and/or validation data itself.

[0306] In one embodiment, the disclosure provides a computational method of selecting a guide RNA for use in a base editing system comprising a napDNAbp and a deaminase, said base editing system being capable of introducing a genetic change into a nucleotide sequence of a target genomic location to achieve a goal genotype outcome, the method comprising: (a) accessing first data indicative of: the goal genotype outcome; and a plurality of sets of candidate base editing determinates; (b) processing the first data using a first computational model to determine second data indicative of a base editing efficiency at the target genomic location for each set of candidate base editing determinates; (c) processing the first data using a second computational model to determine third data indicative of a bystander precision for each set of candidate base editing determinates; and (d) analyzing the second data and third data to identify a guide RNA capable of achieving the goal genotype outcome.

[0307] In one embodiment, the computational method comprises a (1) base editing efficiency model together with (2) a bystander editing model.

### Base Editing Efficiency Model

[0308] The machine learning algorithm described herein (e.g., BE-Hive) can comprise a base efficiency machine learning model.

[0309] Base editing efficiency varies by experimental batch. To combine replicates across batches, first a mean centering and logit transformation was performed at up to 10,638 gRNA-target pairs in each experimental condition separately from the 12kChar library which includes all 4-mers surrounding A or C from protospacer positions 1 to 11. Data was discarded at target sites with fewer than 100 total reads, then averaged values at matched target sites across experimental replicates. Values of negative or positive infinity (resulting from logit of 0 or 1) were discarded. The data were randomly split into training and test sets at a ratio of 90:10. Each target site had a single output value corresponding to the mean logit fraction of sequenced reads with any base editing activity. Data points comprising a single replicate were assigned weight=0.5. Data points comprising multiple replicates were assigned a weight of the median logit variance divided by the logit variance at that data point, or 1, whichever value was smaller. In this manner, exactly half of the data points comprising multiple replicates were assigned a weight of 1, and those with higher variance were assigned a lower weight.

Features from each target sequence were obtained using protospacer positions −9 to 21. Features included one-hot encoded single nucleotide identities at each position, one-hot encoded dinucleotides at neighboring positions, the melting temperature of the sequence and various subsequences, the total number of each nucleotide in the sequence, and the total number of G or C nucleotides in the sequence. Gradient-boosted regression trees from the python package scikit-learn were used, and trained with tuples of (x, y, weights) using the training data. Hyperparameter optimization was performed by varying the number of estimators between {100, 250, 500}, the minimum samples per leaf in {2, 5}, and the maximum tree depth in {2, 3, 4, 5}. A 5-fold cross-validation was performed by splitting the training set into a training and validation set at a ratio of 8:1 and retained the combination of hyperparameters with the strongest average cross-validation performance as the final model. Models were trained in this manner for each combination of cell-type and base editor. Models were evaluated on the test set which was not used during hyperparameter optimization.

[0310] In other aspects, the machine learning model can include or be based solely on a base editing efficiency machine learning model, for example, a method identifying a guide RNA for use in a base editing system for introducing a target change into a nucleotide sequence, the base editing system comprising a napDNAbp and a deaminase, the method comprising: using software executing on at least one computer hardware processor to perform: obtaining input data indicative of the nucleotide sequence and a set of one or more guide RNAs; generating first input features from the input data; applying a first machine learning model to the first input features to obtain first output data indicative, for each one guide RNA in the set of guide RNAs, of a base editing efficiency, at one or multiple locations in the nucleotide sequence, of the base editing system when using the each one guide RNA; and identifying, using the first output data, the guide RNA for use in the base editing system for introducing the target change into the nucleotide sequence.

[0311] Nevertheless, in such aspects, the machine learning model can further comprise a bystander model, comprising generating second input features from the input data; applying a second machine learning model to the second input features to obtain second output data indicative, for each one guide RNA in the set of guide RNAs, of bystander editing activity, at one or multiple locations in the nucleotide sequence, by the base editing system when using the each one guide RNA, wherein identifying the guide RNA is performed using the first output data and the second output data.

[0312] The disclosure also provides at least one computer readable storage medium storing processor executable instructions that, when executed by at least one computer hardware processor, cause the at least one computer hardware processor to perform a method of identifying a guide RNA for use in a base editing system for introducing a target change into a nucleotide sequence, the base editing system comprising a napDNAbp and a deaminase, the method comprising: obtaining input data indicative of the nucleotide sequence and a set of one or more guide RNAs; generating first input features from the input data; applying a first machine learning model to the first input features to obtain first output data indicative, for each one guide RNA in the set of guide RNAs, of a base editing efficiency, at one or multiple locations in the nucleotide sequence, of the base editing system when using the each one guide RNA; and identifying, using the first output data, the guide RNA for use in the base editing system for introducing the target change into the nucleotide sequence.

[0313] In other aspects, the disclosure provides a system, comprising: at least one computer hardware processor; and at least one computer readable storage medium storing processor executable instructions that, when executed by the at least one computer hardware processor, cause the at least one computer hardware processor to perform a method of identifying a guide RNA for use in a base editing system for introducing a target change into a nucleotide sequence, the base editing system comprising a napDNAbp and a deaminase, the method comprising: obtaining input data indicative of the nucleotide sequence and a set of one or more guide RNAs; generating first input features from the input data; applying a first machine learning model to the first input features to obtain first output data indicative, for each one guide RNA in the set of guide RNAs, of a base editing efficiency, at one or multiple locations in the nucleotide sequence, of the base editing system when using the each one guide RNA; and identifying, using the first output data, the guide RNA for use in the base editing system for introducing the target change into the nucleotide sequence.

### Bystander Editing Model

[0314] The machine learning algorithm described herein (e.g., BE-Hive) can comprise a bystander editing machine learning model.

[0315] A dataset was assembled where each gRNA-target pair was matched with a table of observed base editing genotypes and their frequencies among reads with edited outcomes. Data points with fewer than 100 edited reads were discarded. Edited genotypes occurring at higher than 2.5% frequency with no edits at any substrate nucleotides (defined as C for CBEs and A for ABEs) in positions 1-10 were also discarded. Data from multiple experimental replicates were combined by summing read counts for each observed genotype.

[0316] Briefly, a deep conditional autoregressive model was designed and implemented that used an input target sequence surrounding a protospacer and PAM to output a frequency distribution on combinations of base editing outcomes in the python package pytorch. The model predicts substitutions at cytosines and guanines for CBEs and adenines and cytosines for ABEs from protospacer positions −10 to 20. The model transforms each substrate nucleotide and its local context using a shared encoder into a deep representation, then applies an autoregressive decoder that iteratively generates a distribution over base editing outcomes at each substrate nucleotide while conditioning on all previous generated outcomes. The encoder and decoder are coupled with a learned position-wise bias towards producing an unedited outcome. The model is trained on observed data by minimizing the KL divergence. Importantly, the conditional autoregressive design is sufficiently expressive to learn any possible joint distribution in the output space, thereby representing a powerful and general method for learning the editing tendencies of any base editor from data.

[0317] Input features were obtained by one-hot encoding each substrate nucleotide and the 5 nucleotides (where 5 is a hyperparameter) on either side of it and concatenating this with a one-hot encoding of the position of the substrate nucleotide within positions −9 to 20. Additional features considered but found to detract from model performance during hyperparameter optimization included concatenating a one-hot encoding of the full sequence context. Hyperparameter optimization on the radii of nucleotides surrounding the substrate nucleotide considered values in {3, 5, 7, 9}, and found 5 to be optimal when averaged across hyperparameter optimization rounds that included simultaneous changes in other hyperparameters. Each substrate nucleotide within the editing range were featurized in this manner for each target sequence.

[0318] The model uses two neural networks: an encoder with two hidden layers of 64 neurons and a decoder with five hidden layers of 64 neurons. The networks are fully connected, use ReLU activations, and contain residual connections between neighboring pairs of layers that have equal shape. A dropout frequency of 5.0% was used and tuned by hyperparameter optimization. An architecture search in hyperparameter optimization was included and found that these shapes were a local optimum in the surrounding neighborhood varying the number of neurons per layer and the number of layers in each network.

[0319] During a forward pass of the model at a single target site, the shapes of relevant variables are:
[0320] x.shape=(n.edit.b, x_dim)
[0321] y_mask.shape=(n.uniq.e+1, n.edit.b, y_mask_dim)
[0322] target.shape=(n.uniq.e+1, n.edit.b, 4, 1)
[0323] obs_freq.shape=(n.uniq.e)
   where:
[0324] ‘x’ is the featurized input
[0325] ‘y_mask’ is used to provide previously observed outcomes to the decoder while masking future outcomes, in a conditional autoregressive manner
[0326] ‘target’ is a one-hot encoding of each unique edited genotype
[0327] ‘obs_freq’ contains the observed frequencies for each edited genotype
[0328] n.uniq.e=the number of unique observed edited genotypes for a target site
[0329] n.edit.b=the number of editable bases in the target sequence
[0330] x_dim=the number of features for a single substrate nucleotide in a single target sequence.

[0331] The shape n.uniq.e+1 is used to indicate the inclusion of a row for the wild-type outcome. The model was run on this outcome and the result was used to adjust all predicted probabilities to obtain a denominator equal to 1−p(wild-type).

[0332] The tensor ‘y_mask’ was used to provide previously observed outcomes to the decoder while masking future outcomes in a conditional autoregressive fashion. Previously observed unedited nucleotides are encoded as [1/3, 1/3, 1/3], while editable nucleotides are encoded as [0, 0, 0] if unedited, and otherwise are a one-hot encoding of the nucleotide resulting from the base edit. Future nucleotides are encoded as [−1, −1, −1].

[0333] The following shape transformations occur during a forward pass.
[0334] 1. Model encodes x: (n.edit.b, x_dim)→(n.edit.b, x_enc_dim)
[0335] 2. Expanding and concatenating with y_mask→(n.uniq.e+1, n.edit.b, x_enc_dim+y_mask_dim).
[0336] 3. Decode→(n.uniq.e+1, n.edit.b, 1, 4)
[0337] 4. Add unedited bias, then log softmax→(n.uniq.e+1, n.edit.b, 1, 4)
[0338] 5. Matrix multiplication with target one-hot-encoding→(n.uniq.e+1, n.edit.b, 1, 1), reshape→(n.uniq.e+1, n.edit.b)
[0339] 6. Sum log likelihoods→(n.uniq.e+1)
[0340] 7. Adjust all likelihoods by (1−wild-type) denominator→(n.uniq.e). The wild-type outcome is encoded at the last position.

[0341] The resulting (n.uniq.e) shape vector contains a number corresponding to the predicted frequency of each unique observed genotype (totaling n.uniq.e). To obtain a loss during training, the KL divergence between the predicted frequency distribution and the observed frequency distribution is used.

[0342] A learnable bias toward unedited outcomes is a part of the model. This component uses an input shape of (n.uniq.e+1, n.edit.b, 1, 4) and outputs a tensor with equivalent shape: (n.uniq.e+1, n.edit.b, 1, 4). Its parameters correspond to a single value for each position and substrate nucleotide representing a bias towards producing an unedited outcome. One important aspect of the structure of the data is that most dimensions of the input and output tensors vary by target site. Batches comprised of groups of target sites. Empirically, it was observed that this property caused minimal speed gains when training the model on CPUs vs GPUs.

[0343] Thus, in various aspects, the machine learning model can include or be based solely on a bystander machine learning model, comprising a method of identifying a guide RNA for use in a base editing system for introducing a target change into a nucleotide sequence, the base editing system comprising a napDNAbp and a deaminase, the method comprising: using software executing on at least one computer hardware processor to perform: obtaining input data indicative of the nucleotide sequence and a set of one or more guide RNAs; generating first input features from the input data; applying a first machine learning model to the first input features to obtain first output data indicative, for each one guide RNA in the set of guide RNAs, of bystander editing activity, at one or multiple locations in the nucleotide sequence, by the base editing system when using the each one guide RNA; and identifying, using the first output data, the guide RNA for use in the base editing system for introducing the target change into the nucleotide sequence.

[0344] Such a method may further comprise an efficiency machine learning model, comprising generating second input features from the input data; applying a second machine learning model to the second input features to obtain second output data indicative, for each one guide RNA in the set of guide RNAs, of a base editing efficiency, at one or multiple locations in the nucleotide sequence, of the base editing system when using the each one guide RNA, wherein identifying the guide RNA is performed using the first output data and the second output data.

[0345] In other aspects, the disclosure provides at least one computer readable storage medium storing processor executable instructions that, when executed by at least one computer hardware processor, cause the at least one computer hardware processor to perform a method of identifying a guide RNA for use in a base editing system for introducing a target change into a nucleotide sequence, the base editing system comprising a napDNAbp and a deaminase, the method comprising: obtaining input data indicative of the nucleotide sequence and a set of one or more guide RNAs; generating first input features from the input data; applying a first machine learning model to the first input features to obtain first output data indicative, for each one guide RNA in the set of guide RNAs, of bystander editing activity, at one or multiple locations in the nucleotide sequence, by the base editing system when using the each one guide RNA; and identifying, using the first output data, the guide RNA for use in the base editing system for introducing the target change into the nucleotide sequence.

[0346] In still other aspects, the disclosure provides a system, comprising: at least one computer hardware processor; and at least one computer readable storage medium storing processor executable instructions that, when executed by at least one computer hardware processor, cause the at least one computer hardware processor to perform a method of identifying a guide RNA for use in a base editing system for introducing a target change into a nucleotide sequence, the base editing system comprising a napDNAbp and a deaminase, the method comprising: obtaining input data indicative of the nucleotide sequence and a set of one or more guide RNAs; generating first input features from the input data; applying a first machine learning model to the first input features to obtain first output data indicative, for each one guide RNA in the set of guide RNAs, of bystander editing activity, at one or multiple locations in the nucleotide sequence, by the base editing system when using the each one guide RNA; and identifying, using the first output data, the guide RNA for use in the base editing system for introducing the target change into the nucleotide sequence.

Model Training and/or Validation

[0347] Various aspects of the disclosure also relate to methods and compositions (e.g., vector libraries, nucleic acid sequences, base editors, guide RNAs, etc.) for generating biological training data (e.g., actual base editing experimental results from a known input target DNA with the output being sequencing data of the resulting genotype post-editing), which can also be used as validation data when in the context of evaluating an already-trained computational model. The following aspects relate to such methods and compositions for training and/or validating the machine learning computational models. Such aspects include library cloning, cloning, cell culture, deep sequencing, and statistical methods.

### (A) Library Cloning

[0348] In one embodiment, model training and/or validation involves the preparation of a library of target sequences for contacting with one or more candidate base editors. In one embodiment, library cloning is as reported in Shen et al. 2018, with minor changes. In brief, the process involves ordering a library of 2,000 to 12,000 oligonucleotides pairing an sgRNA protospacer with its 35-nt, 56-nt or 61-nt target site, centered on an NGG or NG PAM, as specified. Pools were amplified with NEBNext Ultra II Q5 Master Mix (New England Biolabs) with initial denaturation and extension times extended to 2 minutes per cycle for all PCR reactions to prevent skewing towards GC-rich sequences. To insert the sgRNA hairpin between the sgRNA protospacer and the target site, the library undergoes an intermediate Gibson Assembly circularization step, restriction enzyme linearization and Gibson Assembly into a plasmid backbone containing a U6 promoter to facilitate sgRNA expression, a hygromycin resistance cassette and flanking Tol2 transposon sites to facilitate integration into the genome. Purified plasmids were transformed into NEB10beta (New England Biolabs) electrocompetent cells. Following recovery, a small dilution series was plated to assess transformation efficiency and the remainder was grown in liquid culture in DRM medium overnight at 37° C. with 100 ug/mL ampicillin. The plasmid library was isolated by Midiprep plasmid purification (Qiagen). Library integrity was verified by restriction digest with SapI (New England Biolabs) for 1 hour at 37° C., and sequence diversity was validated by deep sequencing as described below.

### (B) Cloning

[0349] In other embodiments, model training and/or validation involves cloning. Base editor plasmids were constructed by inserting a blasticidin resistance expression cassette from a p2T-CAG-SpCas9-BlastR plasmid (107190) (Arbab et al., 2015) downstream of the bGH-polyA terminator into a BE4 plasmid (100802) (Komor et al., 2017). Tol2-transposase sites from p2T-CAG-SpCas9-BlastR were cloned to flank the base editor and antibiotic selection cassettes. All editors described in this Example were cloned between the N-terminal and C-terminal NLS sequences flanking BE4. The full sequence of the p2T-CAG-BE4max-BlastR plasmid and editor sequences for all editors used in this Example is appended in the ‘Sequences’ section.

[0350] Individual SpCas9 sgRNAs were cloned as a pool into a Tol2-transposon-containing gRNA expression plasmid (Addgene 71485) using BbsI plasmid digest and Gibson Assembly (New England Biolabs). Protospacer sequences and gene specific primers used for amplification followed by HTS are listed in the Primers Table.

### (C) Cell Culture

[0351] In still other embodiments, model training and/or validation involves cell culture. mESC lines used have been described previously and were cultured as described previously (Sherwood et al., 2014). HEK293T and U20S cells were purchased from ATCC and cultured as recommended by ATCC. Cell lines were authenticated by the suppliers and tested negative for Mycoplasma.

[0352] For stable Tol2 transposon library integration, cells were transfected using Lipofectamine 3000 (Thermo Fisher) following standard protocols with equimolar amounts of Tol2 transposase plasmid (a gift from K. Kawakami) and transposon-containing plasmid. For library applications, 15-cm plates with >10⁷ initial cells were used, and for single sgRNA targeting, 48-well plates with >10⁵ initial cells were used. To generate library cell lines with stable Tol2-mediated genomic integration, cells were selected with hygromycin starting the day after transfection at an empirically defined concentration and continued for >2 weeks. In cases where sequential plasmid integration was performed such as integrating library and then base editor, cells were transfected with Tol2 transposase plasmid using Lipofectamine 3000 and selected with blasticidin starting the day after transfection for 4 days before harvesting.

### (D) Deep Sequencing

[0353] In yet other embodiments, model training and/or validation involves deep sequence, e.g., sequencing of experimental base editing genotype results. Genomic DNA was collected from cells 5 days after transfection, after 4 days of antibiotic selection. For library samples, 16 μg gDNA was used for each sample; for individual locus samples and untreated cell library samples, 2 μg gDNA was used; for plasmid library verification, 0.5 μg purified plasmid DNA was used. For individual locus samples, the locus surrounding CRISPR-Cas9 mutation was PCR-amplified in two steps using primers >50-bp from the Cas9 target site. PCR1 was performed to amplify the endogenous locus or library cassette using the primers specified below. PCR2 was performed to add full-length Illumina sequencing adapters using the NEBNext Index Primer Sets 1 and 2 (New England Biolabs) or internally ordered primers with equivalent sequences. All PCRs were performed using NEBNext Ultra II Q5 Master Mix. Extension time for all PCR reactions was extended to 2 minutes per cycle to prevent skewing towards GC-rich sequences. Samples were pooled using Tape Station (Agilent) and quantified using a KAPA Library Quantification Kit (KAPA Biosystems). The pooled samples were sequenced using NextSeq or MiSeq (Illumina).

### (E) Library Names

[0354] Supplementary figures, tables, and deposited data use different names for designed libraries than the manuscript for convenience. The “comprehensive context library” is referred to as “12kChar” and contains 12,000 target sites designed with all 4-mers surrounding a substrate nucleotide at protospacer positions 1-11 and all 6-mers surrounding an adenine or cytosine at position 6. Three disease-associated libraries called “CBE precision editing SNV library”, “ABE precision editing SNV library”, and “transversion-enriched SNV library” in the manuscript are referred to as “CtoT”, “AtoG”, and “CtoGA”, indicating the base editing event that corrects the disease-related variants included in each library.

### (F) Sequence Motif Models

[0355] For prediction tasks where the target variable is continuous and has range in (0, 1), a logistic transformation to the data was applied, and then linear regression was used. For continuous data representing fractions, values equal to 0 or 1 were discarded. For classification tasks, the target variables were either 0 or 1 indicating absence or presence of activity, and logistic regression was used. Target variables included the efficiency of C⋅G-to-T⋅A editing by CBEs, A⋅T-to-G⋅C editing by ABEs, the presence or absence of cytosine editing by ABEs and of guanine editing by CBEs, and the purity of cytosine transversions by CBEs. Each of these statistics involves calculating a denominator corresponding to the total number of reads at a target sequence, or the total number of edited reads at a target sequence. Target sequences with fewer than 100 reads in the denominator were discarded to ensure the accuracy of estimated statistics in the training and testing data. Features were obtained by one-hot-encoding nucleotides per position relative to a substrate nucleotide or to the protospacer. The data were randomly split into training and test sets at an 80:20 ratio. Sequence motifs described by these regression models consider each position independently and are intended primarily for visualization.

### (G) Sequence Alignment and Data Processing

[0356] Sequencing reads were assigned to designed library target sites by locality sensitive hashing). Target contexts that were intentionally designed to be highly similar to each other were designed barcodes to assist accurate assignment. Sequence alignment was performed using Smith-Waterman with the parameters: match +1, mismatch −1, indel start −5, indel extend 0. Nucleotides with PHRED score below 30 were assumed to be the reference nucleotide.

[0357] For base editing analysis, aligned reads with no indels were retained for analysis and events were defined as the combination of all possible substitutions at all substrate nucleotides in the target site in a read, where a single sequencing read corresponds to an observation of a single event. Substrate nucleotides were defined as C and G for CBEs and A and C for ABEs. For indel analysis, reads containing indels with at least one indel position occurring between protospacer positions −6 to 26 were retained, where position 1 is the 5′-most nucleotide of the protospacer, and 0 is used to refer to the position between −1 and 1. Reads containing indels without at least six nucleotides with at least 90% match frequency on both sides of each indel were discarded. Events were defined as indels identified by position, length, and inserted nucleotides occurring in a read. Combination indels were either not observed at all or only at exceedingly low frequencies in endogenous data and were therefore excluded from consideration when analyzing library data.

### (H) Quantifying Base Editing Profiles

[0358] The frequencies of each single-nucleotide mutation were tabulated at each position in each designed target sequence from the sequence alignments. Then, the following steps were applied to adjust treatment data by control data, adjust batch effects and identify base editing mutations that occur at frequencies above background.

[0359] The first step was to filter control mutations in control data occurring at or above a 5.0% frequency threshold. As control conditions do not undergo a second selection step (90-95% cell death then expansion), control mutations that are relatively common are highly likely to expand in frequency in treatment data. Since the resulting treatment population frequency (before editing) has high variance (due to the 90-95% cell death then expansion), it is very difficult to de-confound this factor from mutations occurring due to base editing.

[0360] The second step was to filter treatment mutations that could be explained by control mutations. The probability of treatment mutations occurring from a binomial distribution parameterized by the observed mutation frequency in the control population and filter mutations was determined at FDR=0.05.

[0361] The third step was to filter mutations occurring in both control and treatment conditions, subtract control frequencies from treatment frequencies.

[0362] The fourth step was to filter treatment mutations that could be explained by Illumina sequencing errors. The probability of treatment mutations was determined under a binomial distribution parameterized by the lowest quality (>Q30) sequencing call at that position and filter at FDR=0.05. The empirical determined lowest quality is often Q32 or Q36, which correspond to error thresholds of 6e-4 and 2e-4 respectively.

[0363] The fifth step was to filter treatment mutations that could be explained by batch effects (comparing treatment vs. treatment). Summary statistics of the mean mutation rate were calculated across all target site with a given substrate nucleotide at a particular position to another nucleotide, yielding an L×12 matrix for each condition, where L=55, 56, or 61. Then, perform one-way ANOVA was performed using the batches defined on the first slide and filter mutations at Bonferroni-corrected p-value threshold of 0.005.

[0364] The sixth step was to identify treatment mutations that were consistent by editors across conditions, especially rare ones, while filtering background mutations (comparing treatment vs. treatment). On the batch-effect-corrected L×12 matrix per condition, group by editors, calculate normalized rankings of each mutation within each condition. Perform robust rank aggregation on each mutation to obtain an upper bound on the p-value.

[0365] Based on the above analysis, editing profiles were empirically designed for denoising and filtering base editing outcomes. To ensure high sensitivity, these profiles were designed to be broad to minimize the possibility of excluding reads with legitimate base editing activity. For CBEs, base editing activity was defined as C to A, G, or T at positions −9 to 20 and G to A or C at positions −9 to 5. For ABEs, base editing activity was defined as A to G at positions −5 to 20, A to C or T at positions 1 to 10, and C to G or T at positions 1 to 10. For all analysis described herein that required tabulating reads with base editing activity, reads were discarded that did not have base editing activity according to these broad profiles.

(I) Selection of Variants from Disease Databases

[0366] Disease variants were selected from the NCBI ClinVar database and the Human Gene Mutation Database (HGMD) for computational screening and subsequent experimental correction using versions of both database that were up to date as of September of 2018. Variants from ClinVar that were designated by at least one lab as ‘pathogenic’ or ‘likely pathogenic’ were retained. Variants from HGMD with a disease association of ‘DM’ or disease-causing mutation were retained.

[0367] SpCas9 gRNAs were enumerated for each disease allele. Using a previous version of BE-Hive, predicted correction precisions were predicted for each gRNA-allele combination and used to prioritize the design of libraries. Two libraries of 12,000 gRNA-target pairs were designed called ‘AtoG’ and ‘CtoT’. The ‘AtoG’ library contained 11,585 unique pathogenic variants while ‘CtoT’ contained 7,444 unique pathogenic variants. A third library ‘CtoGA’ with 3,800 gRNA-target pairs targeting pathogenic variants was designed with 2,668 unique pathogenic variants.

### (J) Quantifying the Ratio of Base Editing to Indel Activity

[0368] Target sites with greater than 1000 reads and with at least one indel read were retained (to avoid division by zero). Notably, no pseudocounts were used. To calculate BE:indel ratios, library target sites without a substrate nucleotide within the typical base editing window were filtered. These target sites resulted from the library design choices that prioritized diversity and exploration, but these target sites are unlikely to be selected for editing in common user applications. The geometric mean was selected as a summary statistic because BE:indel ratios were distributed roughly log-normal, and the statistic summarizes more of the data than the median.

### (K) Adjusting for Noise in 1-Bp Indels

[0369] To characterize rare indels from base editing outcomes, endogenous data (with large sequencing depth, in HEK293T cells) was used and designed certain library conditions were designed (with high editing efficiency and deep sequencing coverage) as gold standards to denoise the other library datasets. In both endogenous data and gold-standard library conditions, the fraction of 1-bp indels was observed to be 5-30% of all indels. In contrast, in many treatment library conditions, the fraction was as high as 80-95%, similar to those in untreated library controls. In addition, these background 1-bp indels appeared to occur nearly uniformly across the target site, while in the “gold standard” conditions, 1-bp indels are concentrated near the HNH nick and typical base editing window. Based on these sets of observations, it was reasoned that the conservative adjustment of treatment conditions by control conditions (by subtracting the frequency of indels at matching target sites, with matching indel start position and length) did not completely adjust noise from treatment data. To enable a more accurate calculation of base editing to indel ratios, an additional quality control step was applied where the frequencies of 1-bp indels in library target sites were decreased uniformly such that the global (across the entire library of sequence contexts) frequency of 1-bp indels was at most 30% of all indels.

### (L) Adjusting for Batch Effects in Base Editing to Indel Ratios

[0370] Some batch effects in calculated BE:indel ratios were observed. To adjust for batch effects, two-way ANOVA was applied, crossing experimental batch with base editor, on the geometric mean BE:indel ratio for all library experiments. As instructed by the experimental protocol, the batch must be distinct for each combination of cell-type and library. For this analysis, all point mutants of base editors were dinned with their wild-type versions since small differences in BE:indel ratios were observed that were dominated by differences by experimental batch and by base editor. The average coefficient across all experimental batches was added to the learned coefficient for each base editor to obtain a batch-adjusted coefficient for each base editor. An adjustment factor was obtained as the difference between the average geometric mean BE:indel ratio across experiments for a given base editor and the batch-adjusted coefficient for that base editor. Adjustment factors were used to adjust the BE:indel ratio at individual target sites for analysis requiring such resolution.

### (M) Definition of Disequilibrium Score

[0371] Disequilibrium scores are calculated for a given pair of substrate nucleotides as the ratio between the observed joint editing probability and the probability of both nucleotides being edited together assuming statistical independence. Calculating a valid log disequilibrium score from observed data requires non-zero frequencies for p(first nucleotide is edited), p(second nucleotide is edited), and p(first and second nucleotide are edited). Disequilibrium score values above one indicate a tendency for both or neither to be edited together (positive log disequilibrium score), while values below one indicate a tendency for only one or the other to be edited (negative log disequilibrium score).

### (N) Data and Code Availability

[0372] The sequencing data generated herein are available at the NCBI Sequence Read Archive database under PRJNA591007. Processed data have been deposited under the following DOIs: 10.6084/m9.figshare.10673816 and 10.6084/m9.figshare.10678097. The code used for data processing and analysis are available at github.com/maxwshen/lib-dataprocessing and github.com/maxwshen/lib-analysis.

### BE-Hive Graphical User Interface (GUI)

[0373] In other aspects, the disclosure further provides a graphical user interface that implements BE-Hive, allowing a user to input various features, including a desired target DNA sequence, an appropriate guide RNA (or associated CRISPR protospacer), a base editor, and a cell in which base editing is to take place, and to predict base editing efficiencies and bystander editing patterns for the selected features.

[0374] The GUI is available at www.crisprbehive.desing, the contents of which are incorporated herein by reference. In addition, exemplary screen shots of the GUI are provided in FIGS. 24A-24J and explained herein in the Brief Description of the Drawings. As outlined on the above web site, which is incorporated by reference, BE-Hive predicts base editing efficiency and bystander editing patterns for various base editors using machine learning models trained on observed base editing outcomes from up to 10,638 sgRNA-target sequence pairs integrated into the genomes of mouse embryonic stem cells and human HEK293T cells using SpCas9 and Cas9-NG base editors. These sgRNA-target pairs were designed to be minimally biased and maximally cover possible sequence space. Models for different base editors and cell-types were trained separately.

[0375] The input to a BE-Hive model is a genomic target sequence and an sgRNA sequence. The user selects which base editor and cell-type, which selects which machine learning models to use.

[0376] The editing efficiency model predicts the Z-score relative to the “average” sgRNA-target pair (across our dataset of highly diverse sgRNA-target pairs that cover sequence space with minimal bias). These Z-scores can be converted to the fraction of sequenced reads that have any base editing activity at any nucleotide in the base editing window among all sequenced reads, including unedited wild-type sequenced reads. (See calibration section below). The bystander editing model predicts the frequency of a specific combination of base editing outcomes across all nucleotides in the base editing window among all sequenced reads that have any base editing activity at any nucleotide in the base editing window. The single mode outputs predictions using the above units.

[0377] Predictions from the two models can be combined by simple multiplication since the units in the bystander editing model's denominator and the editing efficiency model's numerator are the same. The units of the combined prediction are the frequency of a specific combination of base editing outcomes across all nucleotides in the base editing window among all sequenced reads, including unedited wild-type sequenced reads. Our batch mode combines predictions in this manner when the toggle “Report frequencies among: sequenced reads by including efficiency” is on.

5′G sgRNA Design

[0378] The base editing data used for training the models can add a 5′G to a 20-nt protospacer when the first nucleotide is not a G.

[0379] We have observed that the base editing window changes depending on whether the protospacer is 20 nt or 21 nt and if the added 5′G is a match or mismatch to the genome. Specifically, when a 21 nt protospacer is used and the 5′G does match the genome, the base editing window is shifted by about 0.5 nucleotides 5′ relative to the window with a 20-nt protospacer.

[0380] The BE-Hive models have automatically learned these properties from the training data. If an sgRNA without a 5′G is used where the design rule would otherwise add it, and it would match the genome, it should noted that your base editing window will be shifted 3′ by about 0.5 nucleotides relative to the BE-Hive predictions.

[0381] It is possible to artificially adjust for this behavior in a manner that can make BE-Hive predictions slightly more accurate for an application. Specifically, if protospacer position 1 is not a G, and the design rule would prepend a 5′G but it is desired not to, and protospacer position 0 is a G, then one can change the G0 to another nucleotide to effectively “trick” the models into using a 20-nt protospacer. It is recommended not to change G0 to a base editing substrate nucleotide and avoiding strong motifs such as TC for CBEs. With these suggestions in mind, it would be typical to use A0 for CBEs and C0 for ABEs.

### Calibrating Editing Efficiency Predictions

[0382] Base editing efficiency depends on cell-type, delivery strategy, and other conditions unique to each experiment. To account for these factors, our base editing efficiency model outputs Z-scores by default, and allows users to provide experiment-specific information to convert the Z-score predictions to the units of the fraction of sequenced reads that have any base editing activity at any nucleotide in the base editing window among all sequenced reads, including unedited wild-type sequenced reads.

[0383] The simplest strategy is to provide the “average” editing efficiency observed in your experimental system, where the average is taken over the theoretical set of all sgRNA-target pairs with all possible sequence contexts. Since most base editing experiments avoid sequence contexts known to have poor efficiency (such as those without centrally located cytosines when using cytosine base editors), simply averaging your previous base editing data is likely to overestimate this quantity.

### What is Total Predicted Probability?

[0384] In tables of predictions provided by the bystander editing model, there is a column called total predicted probability.

[0385] The set of all possible combinations of editing outcomes grows exponentially with the number of substrate nucleotides in a base editing window (denote this as N). At a first glance, this number may appear to be 2\hat{ }N when considering only two possibilities: that each single nucleotide is either edited or not (C or T, in the case of cytosine base editors). However, our work identifies uncommon and rare base editing outcomes including C→G, C→A, G→A conversions by CBEs. Thus when considering cytosine base editing, the possibility space scales as 4\hat{ }N. When N is large, it can take a prohibitive number of forward model evaluations to predict the probability of all exponentially many editing combinations, which would sum to 1.

[0386] However, it is known that some editing combinations are more likely than others. To provide predictions in an efficient and expedient manner, greedy heuristics were used to minimize the number of forward model evaluations while maximizing the total probability accounted for. Since we only query the model on a subset of all possible sequences, the total probability observed must be less than 1.

[0387] In typical cases, the total predicted probability is 0.95 or greater. For downstream applications, the conservative assumption that the remaining probability are allocated to the least desirable editing outcome possible is recommended.

How is BE-Hive Used with Other Cell-Types?

[0388] It is anticipated that base editing activity is generally similar across mammalian cell-types that share similar DNA repair systems. Selecting between mES and HEK293T models by similarity of DNA repair systems is recommended.

How is BE-Hive Used with Other Cas Variants?

[0389] The web app does not explicitly filter protospacers by PAM. If the selected Cas variant has similar base editing activity as SpCas9 or Cas9-NG base editors, but has a different PAM, the appropriate protospacers can be selected from the drop-down menus in the web app.

[0390] If the Cas variant base editor has different activity than SpCas9 or Cas9-NG base editors, including SaCas9 and Cas12a (Cpf1), please refer to our manuscript and supplementary information which discuss using BE-Hive trained on SpCas9/Cas9-NG base editing data on these Cas variants. The base editing window tends to shift and sometimes widen or narrow when modifying the Cas variant, but deaminase-specific sequence preferences do not change substantially (as one would expect).

[0391] II. napDNAbp (Cas9 Domains)

[0392] In one aspect, the methods and base editor compositions described herein involve a nucleic acid programmable DNA binding protein (napDNAbp). Each napDNAbp is associated with at least one guide nucleic acid (e.g., guide RNA), which localizes the napDNAbp to a DNA sequence that comprises a DNA strand (i.e., a target strand) that is complementary to the guide nucleic acid, or a portion thereof (e.g., the protospacer of a guide RNA). In other words, the guide nucleic-acid “programs” the napDNAbp (e.g., Cas9 or equivalent) to localize and bind to a complementary sequence. In various embodiments, the napDNAbp can be fused to a herein disclosed adenosine deaminase or cytidine deaminase.

[0393] Without being bound by any particular theory, the binding mechanism of a napDNAbp-guide RNA complex, in general, includes the step of forming an R-loop whereby the napDNAbp induces the unwinding of a double-strand DNA target, thereby separating the strands in the region bound by the napDNAbp. The guide RNA protospacer then hybridizes to the “target strand.” This displaces a “non-target strand” that is complementary to the target strand, which forms the single strand region of the R-loop. In some embodiments, the napDNAbp includes one or more nuclease activities, which then cut the DNA leaving various types of lesions. For example, the napDNAbp may comprises a nuclease activity that cuts the non-target strand at a first location, and/or cuts the target strand at a second location. Depending on the nuclease activity, the target DNA can be cut to form a “double-stranded break” whereby both strands are cut. In other embodiments, the target DNA can be cut at only a single site, i.e., the DNA is “nicked” on one strand. Exemplary napDNAbp with different nuclease activities include “Cas9 nickase” (“nCas9”) and a deactivated Cas9 having no nuclease activities (“dead Cas9” or “dCas9”).

[0394] The below description of various napDNAbps which can be used in connection with the presently disclose base editors is not meant to be limiting in any way. The base editors may comprise the canonical SpCas9, or any ortholog Cas9 protein, or any variant Cas9 protein—including any naturally occurring variant, mutant, or otherwise engineered version of Cas9—that is known or which can be made or evolved through a directed evolutionary or otherwise mutagenic process. In various embodiments, the Cas9 or Cas9 variants have a nickase activity, i.e., only cleave of strand of the target DNA sequence. In other embodiments, the Cas9 or Cas9 variants have inactive nucleases, i.e., are “dead” Cas9 proteins. Other variant Cas9 proteins that may be used are those having a smaller molecular weight than the canonical SpCas9 (e.g., for easier delivery) or having modified or rearranged primary amino acid structure (e.g., the circular permutant formats). The base editors described herein may also comprise Cas9 equivalents, including Cas12a/Cpf1 and Cas12b proteins which are the result of convergent evolution. The napDNAbps used herein (e.g., SpCas9, Cas9 variant, or Cas9 equivalents) may also contain various modifications that alter/enhance their PAM specifities. Lastly, the application contemplates any Cas9, Cas9 variant, or Cas9 equivalent which has at least 70%, at least 75%, at least 80%, at least 85%, at least 90%, at least 91%, at least 92%, at least 93%, at least 94%, at least 95%, at least 96%, at least 97%, at least 98%, at least 99%, or at least 99.9% sequence identity to a reference Cas9 sequence, such as a references SpCas9 canonical sequence or a reference Cas9 equivalent (e.g., Cas12a/Cpf1).

[0395] The napDNAbp can be a CRISPR (clustered regularly interspaced short palindromic repeat)-associated nuclease. As outlined above, CRISPR is an adaptive immune system that provides protection against mobile genetic elements (viruses, transposable elements and conjugative plasmids). CRISPR clusters contain spacers, sequences complementary to antecedent mobile elements, and target invading nucleic acids. CRISPR clusters are transcribed and processed into CRISPR RNA (crRNA). In type II CRISPR systems correct processing of pre-crRNA requires a trans-encoded small RNA (tracrRNA), endogenous ribonuclease 3 (rnc) and a Cas9 protein. The tracrRNA serves as a guide for ribonuclease 3-aided processing of pre-crRNA. Subsequently, Cas9/crRNA/tracrRNA endonucleolytically cleaves linear or circular dsDNA target complementary to the spacer. The target strand not complementary to crRNA is first cut endonucleolytically, then trimmed 3′-5′ exonucleolytically. In nature, DNA-binding and cleavage typically requires protein and both RNAs. However, single guide RNAs (“sgRNA”, or simply “gNRA”) can be engineered so as to incorporate aspects of both the crRNA and tracrRNA into a single RNA species. See, e.g., Jinek M. et al., Science 337:816-821(2012), the entire contents of which is hereby incorporated by reference.

[0396] In some embodiments, the napDNAbp directs cleavage of one or both strands at the location of a target sequence, such as within the target sequence and/or within the complement of the target sequence. In some embodiments, the napDNAbp directs cleavage of one or both strands within about 1, 2, 3, 4, 5, 6, 7, 8, 9, 10, 15, 20, 25, 50, 100, 200, 500, or more base pairs from the first or last nucleotide of a target sequence. In some embodiments, a vector encodes a napDNAbp that is mutated to with respect to a corresponding wild-type enzyme such that the mutated napDNAbp lacks the ability to cleave one or both strands of a target polynucleotide containing a target sequence. For example, an aspartate-to-alanine substitution (D10A) in the RuvC I catalytic domain of Cas9 from S. pyogenes converts Cas9 from a nuclease that cleaves both strands to a nickase (cleaves a single strand). Other examples of mutations that render Cas9 a nickase include, without limitation, H840A, N854A, and N863A in reference to the canonical SpCas9 sequence, or to equivalent amino acid positions in other Cas9 variants or Cas9 equivalents.

[0397] As used herein, the term “Cas protein” refers to a full-length Cas protein obtained from nature, a recombinant Cas protein having a sequences that differs from a naturally occurring Cas protein, or any fragment of a Cas protein that nevertheless retains all or a significant amount of the requisite basic functions needed for the disclosed methods, i.e., (i) possession of nucleic-acid programmable binding of the Cas protein to a target DNA, and (ii) ability to nick the target DNA sequence on one strand. The Cas proteins contemplated herein embrace CRISPR Cas 9 proteins, as well as Cas9 equivalents, variants (e.g., Cas9 nickase (nCas9) or nuclease inactive Cas9 (dCas9)) homologs, orthologs, or paralogs, whether naturally occurring or non-naturally occurring (e.g., engineered or recombinant), and may include a Cas9 equivalent from any type of CRISPR system (e.g., type II, V, VI), including Cpf1 (a type-V CRISPR-Cas systems), C2c1 (a type V CRISPR-Cas system), C2c2 (a type VI CRISPR-Cas system) and C2c3 (a type V CRISPR-Cas system). Further Cas-equivalents are described in Makarova et al., “C2c2 is a single-component programmable RNA-guided RNA-targeting CRISPR effector,” Science 2016; 353(6299), the contents of which are incorporated herein by reference.

[0398] The terms “Cas9” or “Cas9 nuclease” or “Cas9 moiety” or “Cas9 domain” embrace any naturally occurring Cas9 from any organism, any naturally-occurring Cas9 equivalent or functional fragment thereof, any Cas9 homolog, ortholog, or paralog from any organism, and any mutant or variant of a Cas9, naturally-occurring or engineered. The term Cas9 is not meant to be particularly limiting and may be referred to as a “Cas9 or equivalent.” Exemplary Cas9 proteins are further described herein and/or are described in the art and are incorporated herein by reference. The present disclosure is unlimited with regard to the particular Cas9 that is employed in the base editor (PE) of the invention.

[0399] As noted herein, Cas9 nuclease sequences and structures are well known to those of skill in the art (see, e.g., “Complete genome sequence of an M1 strain of Streptococcus pyogenes.” Ferretti et al., J. J., McShan W. M., Ajdic D. J., Savic D. J., Savic G., Lyon K., Primeaux C., Sezate S., Suvorov A. N., Kenton S., Lai H. S., Lin S. P., Qian Y., Jia H. G., Najar F. Z., Ren Q., Zhu H., Song L., White J., Yuan X., Clifton S. W., Roe B. A., McLaughlin R. E., Proc. Natl. Acad. Sci. U.S.A. 98:4658-4663(2001); “CRISPR RNA maturation by trans-encoded small RNA and host factor RNase III.” Deltcheva E., Chylinski K., Sharma C. M., Gonzales K., Chao Y., Pirzada Z. A., Eckert M. R., Vogel J., Charpentier E., Nature 471:602-607(2011); and “A programmable dual-RNA-guided DNA endonuclease in adaptive bacterial immunity.” Jinek M., Chylinski K., Fonfara I., Hauer M., Doudna J. A., Charpentier E. Science 337:816-821(2012), the entire contents of each of which are incorporated herein by reference).

[0400] Examples of Cas9 and Cas9 equivalents are provided as follows; however, these specific examples are not meant to be limiting. The base editor fusions of the present disclosure may use any suitable napDNAbp, including any suitable Cas9 or Cas9 equivalent.

[0401] (1) Wild Type SpCas9

[0402] In one embodiment, the base editor constructs described herein may comprise the “canonical SpCas9” nuclease from S. pyogenes, which has been widely used as a tool for genome engineering. This Cas9 protein is a large, multi-domain protein containing two distinct nuclease domains. Point mutations can be introduced into Cas9 to abolish one or both nuclease activities, resulting in a nickase Cas9 (nCas9) or dead Cas9 (dCas9), respectively, that still retains its ability to bind DNA in a sgRNA-programmed manner. In principle, when fused to another protein or domain, Cas9 or variant thereof (e.g., nCas9) can target that protein to virtually any DNA sequence simply by co-expression with an appropriate sgRNA. As used herein, the canonical SpCas9 protein refers to the wild type protein from Streptococcus pyogenes having the following amino acid sequence:

| Description | Sequence | SEQ ID NO: |
|---|---|---|
| SpCas9 | MDKKYSIGLDIGTNSVGWAVITDEYKVPSKKFKVLGNTDRHSIKKNLIGALLFDS | 5 |
| Streptococcus | GETAEATRLKRTARRRYTRRKNRICYLQEIFSNEMAKVDDSFFHRLEESFLVEED | |
| pyogenes | KKHERHPIFGNIVDEVAYHEKYPTIYHLRKKLVDSTDKADLRLIYLALAHMIKFR | |
| M1 | GHFLIEGDLNPDNSDVDKLFIQLVQTYNQLFEENPINASGVDAKAILSARLSKSR | |
| SwissProt | RLENLIAQLPGEKKNGLFGNLIALSLGLTPNFKSNFDLAEDAKLQLSKDTYDDDL | |
| Accession | DNLLAQIGDQYADLFLAAKNLSDAILLSDILRVNTEITKAPLSASMIKRYDEHHQ | |
| No. Q99ZW2 | DLTLLKALVRQQLPEKYKEIFFDQSKNGYAGYIDGGASQEEFYKFIKPILEKMDG | |
| Wild type | TEELLVKLNREDLLRKQRTFDNGSIPHQIHLGELHAILRRQEDFYPFLKDNREKI | |
| | EKILTFRIPYYVGPLARGNSRFAWMTRKSEETITPWNFEEVVDKGASAQSFIERM | |
| | TNFDKNLPNEKVLPKHSLLYEYFTVYNELTKVKYVTEGMRKPAFLSGEQKKAIVD | |
| | LLFKTNRKVTVKQLKEDYFKKIECFDSVEISGVEDRFNASLGTYHDLLKIIKDKD | |
| | FLDNEENEDILEDIVLTLTLFEDREMIEERLKTYAHLFDDKVMKQLKRRRYTGWG | |
| | RLSRKLINGIRDKQSGKTILDFLKSDGFANRNFMQLIHDDSLTFKEDIQKAQVSG | |
| | QGDSLHEHIANLAGSPAIKKGILQTVKVVDELVKVMGRHKPENIVIEMARENQTT | |
| | QKGQKNSRERMKRIEEGIKELGSQILKEHPVENTQLQNEKLYLYYLQNGRDMYVD | |
| | QELDINRLSDYDVDHIVPQSFLKDDSIDNKVLTRSDKNRGKSDNVPSEEVVKKMK | |
| | NYWRQLLNAKLITQRKFDNLTKAERGGLSELDKAGFIKRQLVETRQITKHVAQIL | |
| | DSRMNTKYDENDKLIREVKVITLKSKLVSDFRKDFQFYKVREINNYHHAHDAYLN | |
| | AVVGTALIKKYPKLESEFVYGDYKVYDVRKMIAKSEQEIGKATAKYFFYSNIMNF | |
| | FKTEITLANGEIRKRPLIETNGETGEIVWDKGRDFATVRKVLSMPQVNIVKKTEV | |
| | QTGGFSKESILPKRNSDKLIARKKDWDPKKYGGFDSPTVAYSVLVVAKVEKGKSK | |
| | KLKSVKELLGITIMERSSFEKNPIDFLEAKGYKEVKKDLIIKLPKYSLFELENGR | |
| | KRMLASAGELQKGNELALPSKYVNFLYLASHYEKLKGSPEDNEQKQLFVEQHKHY | |
| | LDEIIEQISEFSKRVILADANLDKVLSAYNKHRDKPIREQAENIIHLFTLTNLGA | |
| | PAAFKYFDTTIDRKRYTSTKEVLDATLIHQSITGLYETRIDLSQLGGD | |
| SpCas9 | ATGGATAAAAAATATAGCATTGGCCTGGATATTGGCACCAACAGCGTGGGCTGGG | 6 |
| Reverse | CGGTGATTACCGATGAATATAAAGTGCCGAGCAAAAAATTTAAAGTGCTGGGCAA | |
| translation | CACCGATCGCCATAGCATTAAAAAAAACCTGATTGGCGCGCTGCTGTTTGATAGC | |
| of | GGCGAAACCGCGGAAGCGACCCGCCTGAAACGCACCGCGCGCCGCCGCTATACCC | |
| SwissProt | GCCGCAAAAACCGCATTTGCTATCTGCAGGAAATTTTTAGCAACGAAATGGCGAA | |
| Accession | AGTGGATGATAGCTTTTTTCATCGCCTGGAAGAAAGCTTTCTGGTGGAAGAAGAT | |
| No. Q99ZW2 | AAAAAACATGAACGCCATCCGATTTTTGGCAACATTGTGGATGAAGTGGCGTATC | |
| Streptococcus | ATGAAAAATATCCGACCATTTATCATCTGCGCAAAAAACTGGTGGATAGCACCGA | |
| pyogenes | TAAAGCGGATCTGCGCCTGATTTATCTGGCGCTGGCGCATATGATTAAATTTCGC | |
| | GGCCATTTTCTGATTGAAGGCGATCTGAACCCGGATAACAGCGATGTGGATAAAC | |
| | TGTTTATTCAGCTGGTGCAGACCTATAACCAGCTGTTTGAAGAAAACCCGATTAA | |
| | CGCGAGCGGCGTGGATGCGAAAGCGATTCTGAGCGCGCGCCTGAGCAAAAGCCGC | |
| | CGCCTGGAAAACCTGATTGCGCAGCTGCCGGGCGAAAAAAAAAACGGCCTGTTTG | |
| | GCAACCTGATTGCGCTGAGCCTGGGCCTGACCCCGAACTTTAAAAGCAACTTTGA | |
| | TCTGGCGGAAGATGCGAAACTGCAGCTGAGCAAAGATACCTATGATGATGATCTG | |
| | GATAACCTGCTGGCGCAGATTGGCGATCAGTATGCGGATCTGTTTCTGGCGGCGA | |
| | AAAACCTGAGCGATGCGATTCTGCTGAGCGATATTCTGCGCGTGAACACCGAAAT | |
| | TACCAAAGCGCCGCTGAGCGCGAGCATGATTAAACGCTATGATGAACATCATCAG | |
| | GATCTGACCCTGCTGAAAGCGCTGGTGCGCCAGCAGCTGCCGGAAAAATATAAAG | |
| | AAATTTTTTTTGATCAGAGCAAAAACGGCTATGCGGGCTATATTGATGGCGGCGC | |
| | GAGCCAGGAAGAATTTTATAAATTTATTAAACCGATTCTGGAAAAAATGGATGGC | |
| | ACCGAAGAACTGCTGGTGAAACTGAACCGCGAAGATCTGCTGCGCAAACAGCGCA | |
| | CCTTTGATAACGGCAGCATTCCGCATCAGATTCATCTGGGCGAACTGCATGCGAT | |
| | TCTGCGCCGCCAGGAAGATTTTTATCCGTTTCTGAAAGATAACCGCGAAAAAATT | |
| | GAAAAAATTCTGACCTTTCGCATTCCGTATTATGTGGGCCCGCTGGCGCGCGGCA | |
| | ACAGCCGCTTTGCGTGGATGACCCGCAAAAGCGAAGAAACCATTACCCCGTGGAA | |
| | CTTTGAAGAAGTGGTGGATAAAGGCGCGAGCGCGCAGAGCTTTATTGAACGCATG | |
| | ACCAACTTTGATAAAAACCTGCCGAACGAAAAAGTGCTGCCGAAACATAGCCTGC | |
| | TGTATGAATATTTTACCGTGTATAACGAACTGACCAAAGTGAAATATGTGACCGA | |
| | AGGCATGCGCAAACCGGCGTTTCTGAGCGGCGAACAGAAAAAAGCGATTGTGGAT | |
| | CTGCTGTTTAAAACCAACCGCAAAGTGACCGTGAAACAGCTGAAAGAAGATTATT | |
| | TTAAAAAAATTGAATGCTTTGATAGCGTGGAAATTAGCGGCGTGGAAGATCGCTT | |
| | TAACGCGAGCCTGGGCACCTATCATGATCTGCTGAAAATTATTAAAGATAAAGAT | |
| | TTTCTGGATAACGAAGAAAACGAAGATATTCTGGAAGATATTGTGCTGACCCTGA | |
| | CCCTGTTTGAAGATCGCGAAATGATTGAAGAACGCCTGAAAACCTATGCGCATCT | |
| | GTTTGATGATAAAGTGATGAAACAGCTGAAACGCCGCCGCTATACCGGCTGGGGC | |
| | CGCCTGAGCCGCAAACTGATTAACGGCATTCGCGATAAACAGAGCGGCAAAACCA | |
| | TTCTGGATTTTCTGAAAAGCGATGGCTTTGCGAACCGCAACTTTATGCAGCTGAT | |
| | TCATGATGATAGCCTGACCTTTAAAGAAGATATTCAGAAAGCGCAGGTGAGCGGC | |
| | CAGGGCGATAGCCTGCATGAACATATTGCGAACCTGGCGGGCAGCCCGGCGATTA | |
| | AAAAAGGCATTCTGCAGACCGTGAAAGTGGTGGATGAACTGGTGAAAGTGATGGG | |
| | CCGCCATAAACCGGAAAACATTGTGATTGAAATGGCGCGCGAAAACCAGACCACC | |
| | CAGAAAGGCCAGAAAAACAGCCGCGAACGCATGAAACGCATTGAAGAAGGCATTA | |
| | AAGAACTGGGCAGCCAGATTCTGAAAGAACATCCGGTGGAAAACACCCAGCTGCA | |
| | GAACGAAAAACTGTATCTGTATTATCTGCAGAACGGCCGCGATATGTATGTGGAT | |
| | CAGGAACTGGATATTAACCGCCTGAGCGATTATGATGTGGATCATATTGTGCCGC | |
| | AGAGCTTTCTGAAAGATGATAGCATTGATAACAAAGTGCTGACCCGCAGCGATAA | |
| | AAACCGCGGCAAAAGCGATAACGTGCCGAGCGAAGAAGTGGTGAAAAAAATGAAA | |
| | AACTATTGGCGCCAGCTGCTGAACGCGAAACTGATTACCCAGCGCAAATTTGATA | |
| | ACCTGACCAAAGCGGAACGCGGCGGCCTGAGCGAACTGGATAAAGCGGGCTTTAT | |
| | TAAACGCCAGCTGGTGGAAACCCGCCAGATTACCAAACATGTGGCGCAGATTCTG | |
| | GATAGCCGCATGAACACCAAATATGATGAAAACGATAAACTGATTCGCGAAGTGA | |
| | AAGTGATTACCCTGAAAAGCAAACTGGTGAGCGATTTTCGCAAAGATTTTCAGTT | |
| | TTATAAAGTGCGCGAAATTAACAACTATCATCATGCGCATGATGCGTATCTGAAC | |
| | GCGGTGGTGGGCACCGCGCTGATTAAAAAATATCCGAAACTGGAAAGCGAATTTG | |
| | TGTATGGCGATTATAAAGTGTATGATGTGCGCAAAATGATTGCGAAAAGCGAACA | |
| | GGAAATTGGCAAAGCGACCGCGAAATATTTTTTTTATAGCAACATTATGAACTTT | |
| | TTTAAAACCGAAATTACCCTGGCGAACGGCGAAATTCGCAAACGCCCGCTGATTG | |
| | AAACCAACGGCGAAACCGGCGAAATTGTGTGGGATAAAGGCCGCGATTTTGCGAC | |
| | CGTGCGCAAAGTGCTGAGCATGCCGCAGGTGAACATTGTGAAAAAAACCGAAGTG | |
| | CAGACCGGCGGCTTTAGCAAAGAAAGCATTCTGCCGAAACGCAACAGCGATAAAC | |
| | TGATTGCGCGCAAAAAAGATTGGGATCCGAAAAAATATGGCGGCTTTGATAGCCC | |
| | GACCGTGGCGTATAGCGTGCTGGTGGTGGCGAAAGTGGAAAAAGGCAAAAGCAAA | |
| | AAACTGAAAAGCGTGAAAGAACTGCTGGGCATTACCATTATGGAACGCAGCAGCT | |
| | TTGAAAAAAACCCGATTGATTTTCTGGAAGCGAAAGGCTATAAAGAAGTGAAAAA | |
| | AGATCTGATTATTAAACTGCCGAAATATAGCCTGTTTGAACTGGAAAACGGCCGC | |
| | AAACGCATGCTGGCGAGCGCGGGCGAACTGCAGAAAGGCAACGAACTGGCGCTGC | |
| | CGAGCAAATATGTGAACTTTCTGTATCTGGCGAGCCATTATGAAAAACTGAAAGG | |
| | CAGCCCGGAAGATAACGAACAGAAACAGCTGTTTGTGGAACAGCATAAACATTAT | |
| | CTGGATGAAATTATTGAACAGATTAGCGAATTTAGCAAACGCGTGATTCTGGCGG | |
| | ATGCGAACCTGGATAAAGTGCTGAGCGCGTATAACAAACATCGCGATAAACCGAT | |
| | TCGCGAACAGGCGGAAAACATTATTCATCTGTTTACCCTGACCAACCTGGGCGCG | |
| | CCGGCGGCGTTTAAATATTTTGATACCACCATTGATCGCAAACGCTATACCAGCA | |
| | CCAAAGAAGTGCTGGATGCGACCCTGATTCATCAGAGCATTACCGGCCTGTATGA | |
| | AACCCGCATTGATCTGAGCCAGCTGGGCGGCGAT | |

[0403] The base editors described herein may include canonical SpCas9, or any variant thereof having at least 80%, at least 85%, at least 90%, at least 95%, or at least 99% sequence identity with a wild type Cas9 sequence provided above. These variants may include SpCas9 variants containing one or more mutations, including any known mutation reported with the SwissProt Accession No. Q99ZW2 entry, which include:

| SpCas9 mutation (relative to | Function/Characteristic (as reported) |
|---|---|
| the amino acid sequence | (see UniProtKB - Q99ZW2 |
| of the canonical SpCas9 | (CAS9_STRPT1) entry - |
| sequence, SEQ ID NO: 5) | incorporated herein by reference) |
| D10A | Nickase mutant which cleaves the |
| | protospacer strand (but no cleavage of |
| | non-protospacer strand) |
| S15A | Decreased DNA cleavage activity |
| R66A | Decreased DNA cleavage activity |
| R70A | No DNA cleavage |
| R74A | Decreased DNA cleavage |
| R78A | Decreased DNA cleavage |
| 97-150 deletion | No nuclease activity |
| R165A | Decreased DNA cleavage |
| 175-307 deletion | About 50% decreased DNA cleavage |
| 312-409 deletion | No nuclease activity |
| E762A | Nickase |
| H840A | Nickase mutant which cleaves the non- |
| | protospacer strand but does not cleave |
| | the protospacer strand |
| N854A | Nickase |
| N863A | Nickase |
| H982A | Decreased DNA cleavage |
| D986A | Nickase |
| 1099-1368 deletion | No nuclease activity |
| R1333A | Reduced DNA binding |

[0404] Other wild type SpCas9 sequences that may be used in the present disclosure, include:

| Description | Sequence | SEQ ID NO: |
|---|---|---|
| SpCas9 | ATGGATAAGAAATACTCAATAGGCTTAGATATCGGCACAAATAGCGTCGGATGGGCG | 7 |
| Streptococcus | GTGATCACTGATGATTATAAGGTTCCGTCTAAAAAGTTCAAGGTTCTGGGAAATACA | |
| pyogenes | GACCGCCACAGTATCAAAAAAAATCTTATAGGGGCTCTTTTATTTGGCAGTGGAGAG | |
| MGAS1882 | ACAGCGGAAGCGACTCGTCTCAAACGGACAGCTCGTAGAAGGTATACACGTCGGAAG | |
| wild type | AATCGTATTTGTTATCTACAGGAGATTTTTTCAAATGAGATGGCGAAAGTAGATGAT | |
| NC_017053.1 | AGTTTCTTTCATCGACTTGAAGAGTCTTTTTTGGTGGAAGAAGACAAGAAGCATGAA | |
| | CGTCATCCTATTTTTGGAAATATAGTAGATGAAGTTGCTTATCATGAGAAATATCCA | |
| | ACTATCTATCATCTGCGAAAAAAATTGGCAGATTCTACTGATAAAGCGGATTTGCGC | |
| | TTAATCTATTTGGCCTTAGCGCATATGATTAAGTTTCGTGGTCATTTTTTGATTGAG | |
| | GGAGATTTAAATCCTGATAATAGTGATGTGGACAAACTATTTATCCAGTTGGTACAA | |
| | ATCTACAATCAATTATTTGAAGAAAACCCTATTAACGCAAGTAGAGTAGATGCTAAA | |
| | GCGATTCTTTCTGCACGATTGAGTAAATCAAGACGATTAGAAAATCTCATTGCTCAG | |
| | CTCCCCGGTGAGAAGAGAAATGGCTTGTTTGGGAATCTCATTGCTTTGTCATTGGGA | |
| | TTGACCCCTAATTTTAAATCAAATTTTGATTTGGCAGAAGATGCTAAATTACAGCTT | |
| | TCAAAAGATACTTACGATGATGATTTAGATAATTTATTGGCGCAAATTGGAGATCAA | |
| | TATGCTGATTTGTTTTTGGCAGCTAAGAATTTATCAGATGCTATTTTACTTTCAGAT | |
| | ATCCTAAGAGTAAATAGTGAAATAACTAAGGCTCCCCTATCAGCTTCAATGATTAAG | |
| | CGCTACGATGAACATCATCAAGACTTGACTCTTTTAAAAGCTTTAGTTCGACAACAA | |
| | CTTCCAGAAAAGTATAAAGAAATCTTTTTTGATCAATCAAAAAACGGATATGCAGGT | |
| | TATATTGATGGGGGAGCTAGCCAAGAAGAATTTTATAAATTTATCAAACCAATTTTA | |
| | GAAAAAATGGATGGTACTGAGGAATTATTGGTGAAACTAAATCGTGAAGATTTGCTG | |
| | CGCAAGCAACGGACCTTTGACAACGGCTCTATTCCCCATCAAATTCACTTGGGTGAG | |
| | CTGCATGCTATTTTGAGAAGACAAGAAGACTTTTATCCATTTTTAAAAGACAATCGT | |
| | GAGAAGATTGAAAAAATCTTGACTTTTCGAATTCCTTATTATGTTGGTCCATTGGCG | |
| | CGTGGCAATAGTCGTTTTGCATGGATGACTCGGAAGTCTGAAGAAACAATTACCCCA | |
| | TGGAATTTTGAAGAAGTTGTCGATAAAGGTGCTTCAGCTCAATCATTTATTGAACGC | |
| | ATGACAAACTTTGATAAAAATCTTCCAAATGAAAAAGTACTACCAAAACATAGTTTG | |
| | CTTTATGAGTATTTTACGGTTTATAACGAATTGACAAAGGTCAAATATGTTACTGAG | |
| | GGAATGCGAAAACCAGCATTTCTTTCAGGTGAACAGAAGAAAGCCATTGTTGATTTA | |
| | CTCTTCAAAACAAATCGAAAAGTAACCGTTAAGCAATTAAAAGAAGATTATTTCAAA | |
| | AAAATAGAATGTTTTGATAGTGTTGAAATTTCAGGAGTTGAAGATAGATTTAATGCT | |
| | TCATTAGGCGCCTACCATGATTTGCTAAAAATTATTAAAGATAAAGATTTTTTGGAT | |
| | AATGAAGAAAATGAAGATATCTTAGAGGATATTGTTTTAACATTGACCTTATTTGAA | |
| | GATAGGGGGATGATTGAGGAAAGACTTAAAACATATGCTCACCTCTTTGATGATAAG | |
| | GTGATGAAACAGCTTAAACGTCGCCGTTATACTGGTTGGGGACGTTTGTCTCGAAAA | |
| | TTGATTAATGGTATTAGGGATAAGCAATCTGGCAAAACAATATTAGATTTTTTGAAA | |
| | TCAGATGGTTTTGCCAATCGCAATTTTATGCAGCTGATCCATGATGATAGTTTGACA | |
| | TTTAAAGAAGATATTCAAAAAGCACAGGTGTCTGGACAAGGCCATAGTTTACATGAA | |
| | CAGATTGCTAACTTAGCTGGCAGTCCTGCTATTAAAAAAGGTATTTTACAGACTGTA | |
| | AAAATTGTTGATGAACTGGTCAAAGTAATGGGGCATAAGCCAGAAAATATCGTTATT | |
| | GAAATGGCACGTGAAAATCAGACAACTCAAAAGGGCCAGAAAAATTCGCGAGAGCGT | |
| | ATGAAACGAATCGAAGAAGGTATCAAAGAATTAGGAAGTCAGATTCTTAAAGAGCAT | |
| | CCTGTTGAAAATACTCAATTGCAAAATGAAAAGCTCTATCTCTATTATCTACAAAAT | |
| | GGAAGAGACATGTATGTGGACCAAGAATTAGATATTAATCGTTTAAGTGATTATGAT | |
| | GTCGATCACATTGTTCCACAAAGTTTCATTAAAGACGATTCAATAGACAATAAGGTA | |
| | CTAACGCGTTCTGATAAAAATCGTGGTAAATCGGATAACGTTCCAAGTGAAGAAGTA | |
| | GTCAAAAAGATGAAAAACTATTGGAGACAACTTCTAAACGCCAAGTTAATCACTCAA | |
| | CGTAAGTTTGATAATTTAACGAAAGCTGAACGTGGAGGTTTGAGTGAACTTGATAAA | |
| | GCTGGTTTTATCAAACGCCAATTGGTTGAAACTCGCCAAATCACTAAGCATGTGGCA | |
| | CAAATTTTGGATAGTCGCATGAATACTAAATACGATGAAAATGATAAACTTATTCGA | |
| | GAGGTTAAAGTGATTACCTTAAAATCTAAATTAGTTTCTGACTTCCGAAAAGATTTC | |
| | CAATTCTATAAAGTACGTGAGATTAACAATTACCATCATGCCCATGATGCGTATCTA | |
| | AATGCCGTCGTTGGAACTGCTTTGATTAAGAAATATCCAAAACTTGAATCGGAGTTT | |
| | GTCTATGGTGATTATAAAGTTTATGATGTTCGTAAAATGATTGCTAAGTCTGAGCAA | |
| | GAAATAGGCAAAGCAACCGCAAAATATTTCTTTTACTCTAATATCATGAACTTCTTC | |
| | AAAACAGAAATTACACTTGCAAATGGAGAGATTCGCAAACGCCCTCTAATCGAAACT | |
| | AATGGGGAAACTGGAGAAATTGTCTGGGATAAAGGGCGAGATTTTGCCACAGTGCGC | |
| | AAAGTATTGTCCATGCCCCAAGTCAATATTGTCAAGAAAACAGAAGTACAGACAGGC | |
| | GGATTCTCCAAGGAGTCAATTTTACCAAAAAGAAATTCGGACAAGCTTATTGCTCGT | |
| | AAAAAAGACTGGGATCCAAAAAAATATGGTGGTTTTGATAGTCCAACGGTAGCTTAT | |
| | TCAGTCCTAGTGGTTGCTAAGGTGGAAAAAGGGAAATCGAAGAAGTTAAAATCCGTT | |
| | AAAGAGTTACTAGGGATCACAATTATGGAAAGAAGTTCCTTTGAAAAAAATCCGATT | |
| | GACTTTTTAGAAGCTAAAGGATATAAGGAAGTTAAAAAAGACTTAATCATTAAACTA | |
| | CCTAAATATAGTCTTTTTGAGTTAGAAAACGGTCGTAAACGGATGCTGGCTAGTGCC | |
| | GGAGAATTACAAAAAGGAAATGAGCTGGCTCTGCCAAGCAAATATGTGAATTTTTTA | |
| | TATTTAGCTAGTCATTATGAAAAGTTGAAGGGTAGTCCAGAAGATAACGAACAAAAA | |
| | CAATTGTTTGTGGAGCAGCATAAGCATTATTTAGATGAGATTATTGAGCAAATCAGT | |
| | GAATTTTCTAAGCGTGTTATTTTAGCAGATGCCAATTTAGATAAAGTTCTTAGTGCA | |
| | TATAACAAACATAGAGACAAACCAATACGTGAACAAGCAGAAAATATTATTCATTTA | |
| | TTTACGTTGACGAATCTTGGAGCTCCCGCTGCTTTTAAATATTTTGATACAACAATT | |
| | GATCGTAAACGATATACGTCTACAAAAGAAGTTTTAGATGCCACTCTTATCCATCAA | |
| | TCCATCACTGGTCTTTATGAAACACGCATTGATTTGAGTCAGCTAGGAGGTGACTGA | |
| SpCas9 | MDKKYSIGLDIGTNSVGWAVITDDYKVPSKKFKVLGNTDRHSIKKNLIGALLFGSGE | 8 |
| Streptococcus | TAEATRLKRTARRRYTRRKNRICYLQEIFSNEMAKVDDSFFHRLEESFLVEEDKKHE | |
| pyogenes | RHPIFGNIVDEVAYHEKYPTIYHLRKKLADSTDKADLRLIYLALAHMIKFRGHFLIE | |
| MGAS1882 | GDLNPDNSDVDKLFIQLVQIYNQLFEENPINASRVDAKAILSARLSKSRRLENLIAQ | |
| wild type | LPGEKRNGLFGNLIALSLGLTPNFKSNFDLAEDAKLQLSKDTYDDDLDNLLAQIGDQ | |
| NC_017053.1 | YADLFLAAKNLSDAILLSDILRVNSEITKAPLSASMIKRYDEHHQDLTLLKALVRQQ | |
| | LPEKYKEIFFDQSKNGYAGYIDGGASQEEFYKFIKPILEKMDGTEELLVKLNREDLL | |
| | RKQRTFDNGSIPHQIHLGELHAILRRQEDFYPFLKDNREKIEKILTFRIPYYVGPLA | |
| | RGNSRFAWMTRKSEETITPWNFEEVVDKGASAQSFIERMTNFDKNLPNEKVLPKHSL | |
| | LYEYFTVYNELTKVKYVTEGMRKPAFLSGEQKKAIVDLLFKTNRKVTVKQLKEDYFK | |
| | KIECFDSVEISGVEDRFNASLGAYHDLLKIIKDKDFLDNEENEDILEDIVLTLTLFE | |
| | DRGMIEERLKTYAHLFDDKVMKQLKRRRYTGWGRLSRKLINGIRDKQSGKTILDFLK | |
| | SDGFANRNFMQLIHDDSLTFKEDIQKAQVSGQGHSLHEQIANLAGSPAIKKGILQTV | |
| | KIVDELVKVMGHKPENIVIEMARENQTTQKGQKNSRERMKRIEEGIKELGSQILKEH | |
| | PVENTQLQNEKLYLYYLQNGRDMYVDQELDINRLSDYDVDHIVPQSFIKDDSIDNKV | |
| | LTRSDKNRGKSDNVPSEEVVKKMKNYWRQLLNAKLITQRKFDNLTKAERGGLSELDK | |
| | AGFIKRQLVETRQITKHVAQILDSRMNTKYDENDKLIREVKVITLKSKLVSDFRKDF | |
| | QFYKVREINNYHHAHDAYLNAVVGTALIKKYPKLESEFVYGDYKVYDVRKMIAKSEQ | |
| | EIGKATAKYFFYSNIMNFFKTEITLANGEIRKRPLIETNGETGEIVWDKGRDFATVR | |
| | KVLSMPQVNIVKKTEVQTGGFSKESILPKRNSDKLIARKKDWDPKKYGGFDSPTVAY | |
| | SVLVVAKVEKGKSKKLKSVKELLGITIMERSSFEKNPIDFLEAKGYKEVKKDLIIKL | |
| | PKYSLFELENGRKRMLASAGELQKGNELALPSKYVNFLYLASHYEKLKGSPEDNEQK | |
| | QLFVEQHKHYLDEIIEQISEFSKRVILADANLDKVLSAYNKHRDKPIREQAENIIHL | |
| | FTLTNLGAPAAFKYFDTTIDRKRYTSTKEVLDATLIHQSITGLYETRIDLSQLGGD | |
| SpCas9 | ATGGATAAAAAGTATTCTATTGGTTTAGACATCGGCACTAATTCCGTTGGATGGGCT | 9 |
| Streptococcus | GTCATAACCGATGAATACAAAGTACCTTCAAAGAAATTTAAGGTGTTGGGGAACACA | |
| pyogenes | GACCGTCATTCGATTAAAAAGAATCTTATCGGTGCCCTCCTATTCGATAGTGGCGAA | |
| wild type | ACGGCAGAGGCGACTCGCCTGAAACGAACCGCTCGGAGAAGGTATACACGTCGCAAG | |
| SWBC2D7W014 | AACCGAATATGTTACTTACAAGAAATTTTTAGCAATGAGATGGCCAAAGTTGACGAT | |
| | TCTTTCTTTCACCGTTTGGAAGAGTCCTTCCTTGTCGAAGAGGACAAGAAACATGAA | |
| | CGGCACCCCATCTTTGGAAACATAGTAGATGAGGTGGCATATCATGAAAAGTACCCA | |
| | ACGATTTATCACCTCAGAAAAAAGCTAGTTGACTCAACTGATAAAGCGGACCTGAGG | |
| | TTAATCTACTTGGCTCTTGCCCATATGATAAAGTTCCGTGGGCACTTTCTCATTGAG | |
| | GGTGATCTAAATCCGGACAACTCGGATGTCGACAAACTGTTCATCCAGTTAGTACAA | |
| | ACCTATAATCAGTTGTTTGAAGAGAACCCTATAAATGCAAGTGGCGTGGATGCGAAG | |
| | GCTATTCTTAGCGCCCGCCTCTCTAAATCCCGACGGCTAGAAAACCTGATCGCACAA | |
| | TTACCCGGAGAGAAGAAAAATGGGTTGTTCGGTAACCTTATAGCGCTCTCACTAGGC | |
| | CTGACACCAAATTTTAAGTCGAACTTCGACTTAGCTGAAGATGCCAAATTGCAGCTT | |
| | AGTAAGGACACGTACGATGACGATCTCGACAATCTACTGGCACAAATTGGAGATCAG | |
| | TATGCGGACTTATTTTTGGCTGCCAAAAACCTTAGCGATGCAATCCTCCTATCTGAC | |
| | ATACTGAGAGTTAATACTGAGATTACCAAGGCGCCGTTATCCGCTTCAATGATCAAA | |
| | AGGTACGATGAACATCACCAAGACTTGACACTTCTCAAGGCCCTAGTCCGTCAGCAA | |
| | CTGCCTGAGAAATATAAGGAAATATTCTTTGATCAGTCGAAAAACGGGTACGCAGGT | |
| | TATATTGACGGCGGAGCGAGTCAAGAGGAATTCTACAAGTTTATCAAACCCATATTA | |
| | GAGAAGATGGATGGGACGGAAGAGTTGCTTGTAAAACTCAATCGCGAAGATCTACTG | |
| | CGAAAGCAGCGGACTTTCGACAACGGTAGCATTCCACATCAAATCCACTTAGGCGAA | |
| | TTGCATGCTATACTTAGAAGGCAGGAGGATTTTTATCCGTTCCTCAAAGACAATCGT | |
| | GAAAAGATTGAGAAAATCCTAACCTTTCGCATACCTTACTATGTGGGACCCCTGGCC | |
| | CGAGGGAACTCTCGGTTCGCATGGATGACAAGAAAGTCCGAAGAAACGATTACTCCA | |
| | TGGAATTTTGAGGAAGTTGTCGATAAAGGTGCGTCAGCTCAATCGTTCATCGAGAGG | |
| | ATGACCAACTTTGACAAGAATTTACCGAACGAAAAAGTATTGCCTAAGCACAGTTTA | |
| | CTTTACGAGTATTTCACAGTGTACAATGAACTCACGAAAGTTAAGTATGTCACTGAG | |
| | GGCATGCGTAAACCCGCCTTTCTAAGCGGAGAACAGAAGAAAGCAATAGTAGATCTG | |
| | TTATTCAAGACCAACCGCAAAGTGACAGTTAAGCAATTGAAAGAGGACTACTTTAAG | |
| | AAAATTGAATGCTTCGATTCTGTCGAGATCTCCGGGGTAGAAGATCGATTTAATGCG | |
| | TCACTTGGTACGTATCATGACCTCCTAAAGATAATTAAAGATAAGGACTTCCTGGAT | |
| | AACGAAGAGAATGAAGATATCTTAGAAGATATAGTGTTGACTCTTACCCTCTTTGAA | |
| | GATCGGGAAATGATTGAGGAAAGACTAAAAACATACGCTCACCTGTTCGACGATAAG | |
| | GTTATGAAACAGTTAAAGAGGCGTCGCTATACGGGCTGGGGACGATTGTCGCGGAAA | |
| | CTTATCAACGGGATAAGAGACAAGCAAAGTGGTAAAACTATTCTCGATTTTCTAAAG | |
| | AGCGACGGCTTCGCCAATAGGAACTTTATGCAGCTGATCCATGATGACTCTTTAACC | |
| | TTCAAAGAGGATATACAAAAGGCACAGGTTTCCGGACAAGGGGACTCATTGCACGAA | |
| | CATATTGCGAATCTTGCTGGTTCGCCAGCCATCAAAAAGGGCATACTCCAGACAGTC | |
| | AAAGTAGTGGATGAGCTAGTTAAGGTCATGGGACGTCACAAACCGGAAAACATTGTA | |
| | ATCGAGATGGCACGCGAAAATCAAACGACTCAGAAGGGGCAAAAAAACAGTCGAGAG | |
| | CGGATGAAGAGAATAGAAGAGGGTATTAAAGAACTGGGCAGCCAGATCTTAAAGGAG | |
| | CATCCTGTGGAAAATACCCAATTGCAGAACGAGAAACTTTACCTCTATTACCTACAA | |
| | AATGGAAGGGACATGTATGTTGATCAGGAACTGGACATAAACCGTTTATCTGATTAC | |
| | GACGTCGATCACATTGTACCCCAATCCTTTTTGAAGGACGATTCAATCGACAATAAA | |
| | GTGCTTACACGCTCGGATAAGAACCGAGGGAAAAGTGACAATGTTCCAAGCGAGGAA | |
| | GTCGTAAAGAAAATGAAGAACTATTGGCGGCAGCTCCTAAATGCGAAACTGATAACG | |
| | CAAAGAAAGTTCGATAACTTAACTAAAGCTGAGAGGGGTGGCTTGTCTGAACTTGAC | |
| | AAGGCCGGATTTATTAAACGTCAGCTCGTGGAAACCCGCCAAATCACAAAGCATGTT | |
| | GCACAGATACTAGATTCCCGAATGAATACGAAATACGACGAGAACGATAAGCTGATT | |
| | CGGGAAGTCAAAGTAATCACTTTAAAGTCAAAATTGGTGTCGGACTTCAGAAAGGAT | |
| | TTTCAATTCTATAAAGTTAGGGAGATAAATAACTACCACCATGCGCACGACGCTTAT | |
| | CTTAATGCCGTCGTAGGGACCGCACTCATTAAGAAATACCCGAAGCTAGAAAGTGAG | |
| | TTTGTGTATGGTGATTACAAAGTTTATGACGTCCGTAAGATGATCGCGAAAAGCGAA | |
| | CAGGAGATAGGCAAGGCTACAGCCAAATACTTCTTTTATTCTAACATTATGAATTTC | |
| | TTTAAGACGGAAATCACTCTGGCAAACGGAGAGATACGCAAACGACCTTTAATTGAA | |
| | ACCAATGGGGAGACAGGTGAAATCGTATGGGATAAGGGCCGGGACTTCGCGACGGTG | |
| | AGAAAAGTTTTGTCCATGCCCCAAGTCAACATAGTAAAGAAAACTGAGGTGCAGACC | |
| | GGAGGGTTTTCAAAGGAATCGATTCTTCCAAAAAGGAATAGTGATAAGCTCATCGCT | |
| | CGTAAAAAGGACTGGGACCCGAAAAAGTACGGTGGCTTCGATAGCCCTACAGTTGCC | |
| | TATTCTGTCCTAGTAGTGGCAAAAGTTGAGAAGGGAAAATCCAAGAAACTGAAGTCA | |
| | GTCAAAGAATTATTGGGGATAACGATTATGGAGCGCTCGTCTTTTGAAAAGAACCCC | |
| | ATCGACTTCCTTGAGGCGAAAGGTTACAAGGAAGTAAAAAAGGATCTCATAATTAAA | |
| | CTACCAAAGTATAGTCTGTTTGAGTTAGAAAATGGCCGAAAACGGATGTTGGCTAGC | |
| | GCCGGAGAGCTTCAAAAGGGGAACGAACTCGCACTACCGTCTAAATACGTGAATTTC | |
| | CTGTATTTAGCGTCCCATTACGAGAAGTTGAAAGGTTCACCTGAAGATAACGAACAG | |
| | AAGCAACTTTTTGTTGAGCAGCACAAACATTATCTCGACGAAATCATAGAGCAAATT | |
| | TCGGAATTCAGTAAGAGAGTCATCCTAGCTGATGCCAATCTGGACAAAGTATTAAGC | |
| | GCATACAACAAGCACAGGGATAAACCCATACGTGAGCAGGCGGAAAATATTATCCAT | |
| | TTGTTTACTCTTACCAACCTCGGCGCTCCAGCCGCATTCAAGTATTTTGACACAACG | |
| | ATAGATCGCAAACGATACACTTCTACCAAGGAGGTGCTAGACGCGACACTGATTCAC | |
| | CAATCCATCACGGGATTATATGAAACTCGGATAGATTTGTCACAGCTTGGGGGTGAC | |
| | GGATCCCCCAAGAAGAAGAGGAAAGTCTCGAGCGACTACAAAGACCATGACGGTGAT | |
| | TATAAAGATCATGACATCGATTACAAGGATGACGATGACAAGGCTGCAGGA | |
| SpCas9 | MDKKYSIGLDIGTNSVGWAVITDEYKVPSKKFKVLGNTDRHSIKKNLIGALLFDSGE | 10 |
| Streptococcus | TAEATRLKRTARRRYTRRKNRICYLQEIFSNEMAKVDDSFFHRLEESFLVEEDKKHE | |
| pyogenes | RHPIFGNIVDEVAYHEKYPTIYHLRKKLVDSTDKADLRLIYLALAHMIKFRGHFLIE | |
| wild type | GDLNPDNSDVDKLFIQLVQTYNQLFEENPINASGVDAKAILSARLSKSRRLENLIAQ | |
| Encoded | LPGEKKNGLFGNLIALSLGLTPNFKSNFDLAEDAKLQLSKDTYDDDLDNLLAQIGDQ | |
| product of | YADLFLAAKNLSDAILLSDILRVNTEITKAPLSASMIKRYDEHHQDLTLLKALVRQQ | |
| SWBC2D7W014 | LPEKYKEIFFDQSKNGYAGYIDGGASQEEFYKFIKPILEKMDGTEELLVKLNREDLL | |
| | RKQRTFDNGSIPHQIHLGELHAILRRQEDFYPFLKDNREKIEKILTFRIPYYVGPLA | |
| | RGNSRFAWMTRKSEETITPWNFEEVVDKGASAQSFIERMTNFDKNLPNEKVLPKHSL | |
| | LYEYFTVYNELTKVKYVTEGMRKPAFLSGEQKKAIVDLLFKTNRKVTVKQLKEDYFK | |
| | KIECFDSVEISGVEDRFNASLGTYHDLLKIIKDKDFLDNEENEDILEDIVLTLTLFE | |
| | DREMIEERLKTYAHLFDDKVMKQLKRRRYTGWGRLSRKLINGIRDKQSGKTILDFLK | |
| | SDGFANRNFMQLIHDDSLTFKEDIQKAQVSGQGDSLHEHIANLAGSPAIKKGILQTV | |
| | KVVDELVKVMGRHKPENIVIEMARENQTTQKGQKNSRERMKRIEEGIKELGSQILKE | |
| | HPVENTQLQNEKLYLYYLQNGRDMYVDQELDINRLSDYDVDHIVPQSFLKDDSIDNK | |
| | VLTRSDKNRGKSDNVPSEEVVKKMKNYWRQLLNAKLITQRKFDNLTKAERGGLSELD | |
| | KAGFIKRQLVETRQITKHVAQILDSRMNTKYDENDKLIREVKVITLKSKLVSDFRKD | |
| | FQFYKVREINNYHHAHDAYLNAVVGTALIKKYPKLESEFVYGDYKVYDVRKMIAKSE | |
| | QEIGKATAKYFFYSNIMNFFKTEITLANGEIRKRPLIETNGETGEIVWDKGRDFATV | |
| | RKVLSMPQVNIVKKTEVQTGGFSKESILPKRNSDKLIARKKDWDPKKYGGFDSPTVA | |
| | YSVLVVAKVEKGKSKKLKSVKELLGITIMERSSFEKNPIDFLEAKGYKEVKKDLIIK | |
| | LPKYSLFELENGRKRMLASAGELQKGNELALPSKYVNFLYLASHYEKLKGSPEDNEQ | |
| | KQLFVEQHKHYLDEIIEQISEFSKRVILADANLDKVLSAYNKHRDKPIREQAENIIH | |
| | LFTLTNLGAPAAFKYFDTTIDRKRYTSTKEVLDATLIHQSITGLYETRIDLSQLGGD | |
| | GSPKKKRKVSSDYKDHDGDYKDHDIDYKDDDDKAAG | |
| SpCas9 | ATGGATAAGAAATACTCAATAGGCTTAGATATCGGCACAAATAGCGTCGGATGGGCG | 11 |
| Streptococcus | GTGATCACTGATGAATATAAGGTTCCGTCTAAAAAGTTCAAGGTTCTGGGAAATACA | |
| pyogenes | GACCGCCACAGTATCAAAAAAAATCTTATAGGGGCTCTTTTATTTGACAGTGGAGAG | |
| M1GAS wild | ACAGCGGAAGCGACTCGTCTCAAACGGACAGCTCGTAGAAGGTATACACGTCGGAAG | |
| type | AATCGTATTTGTTATCTACAGGAGATTTTTTCAAATGAGATGGCGAAAGTAGATGAT | |
| NC002737.2 | AGTTTCTTTCATCGACTTGAAGAGTCTTTTTTGGTGGAAGAAGACAAGAAGCATGAA | |
| | CGTCATCCTATTTTTGGAAATATAGTAGATGAAGTTGCTTATCATGAGAAATATCCA | |
| | ACTATCTATCATCTGCGAAAAAAATTGGTAGATTCTACTGATAAAGCGGATTTGCGC | |
| | TTAATCTATTTGGCCTTAGCGCATATGATTAAGTTTCGTGGTCATTTTTTGATTGAG | |
| | GGAGATTTAAATCCTGATAATAGTGATGTGGACAAACTATTTATCCAGTTGGTACAA | |
| | ACCTACAATCAATTATTTGAAGAAAACCCTATTAACGCAAGTGGAGTAGATGCTAAA | |
| | GCGATTCTTTCTGCACGATTGAGTAAATCAAGACGATTAGAAAATCTCATTGCTCAG | |
| | CTCCCCGGTGAGAAGAAAAATGGCTTATTTGGGAATCTCATTGCTTTGTCATTGGGT | |
| | TTGACCCCTAATTTTAAATCAAATTTTGATTTGGCAGAAGATGCTAAATTACAGCTT | |
| | TCAAAAGATACTTACGATGATGATTTAGATAATTTATTGGCGCAAATTGGAGATCAA | |
| | TATGCTGATTTGTTTTTGGCAGCTAAGAATTTATCAGATGCTATTTTACTTTCAGAT | |
| | ATCCTAAGAGTAAATACTGAAATAACTAAGGCTCCCCTATCAGCTTCAATGATTAAA | |
| | CGCTACGATGAACATCATCAAGACTTGACTCTTTTAAAAGCTTTAGTTCGACAACAA | |
| | CTTCCAGAAAAGTATAAAGAAATCTTTTTTGATCAATCAAAAAACGGATATGCAGGT | |
| | TATATTGATGGGGGAGCTAGCCAAGAAGAATTTTATAAATTTATCAAACCAATTTTA | |
| | GAAAAAATGGATGGTACTGAGGAATTATTGGTGAAACTAAATCGTGAAGATTTGCTG | |
| | CGCAAGCAACGGACCTTTGACAACGGCTCTATTCCCCATCAAATTCACTTGGGTGAG | |
| | CTGCATGCTATTTTGAGAAGACAAGAAGACTTTTATCCATTTTTAAAAGACAATCGT | |
| | GAGAAGATTGAAAAAATCTTGACTTTTCGAATTCCTTATTATGTTGGTCCATTGGCG | |
| | CGTGGCAATAGTCGTTTTGCATGGATGACTCGGAAGTCTGAAGAAACAATTACCCCA | |
| | TGGAATTTTGAAGAAGTTGTCGATAAAGGTGCTTCAGCTCAATCATTTATTGAACGC | |
| | ATGACAAACTTTGATAAAAATCTTCCAAATGAAAAAGTACTACCAAAACATAGTTTG | |
| | CTTTATGAGTATTTTACGGTTTATAACGAATTGACAAAGGTCAAATATGTTACTGAA | |
| | GGAATGCGAAAACCAGCATTTCTTTCAGGTGAACAGAAGAAAGCCATTGTTGATTTA | |
| | CTCTTCAAAACAAATCGAAAAGTAACCGTTAAGCAATTAAAAGAAGATTATTTCAAA | |
| | AAAATAGAATGTTTTGATAGTGTTGAAATTTCAGGAGTTGAAGATAGATTTAATGCT | |
| | TCATTAGGTACCTACCATGATTTGCTAAAAATTATTAAAGATAAAGATTTTTTGGAT | |
| | AATGAAGAAAATGAAGATATCTTAGAGGATATTGTTTTAACATTGACCTTATTTGAA | |
| | GATAGGGAGATGATTGAGGAAAGACTTAAAACATATGCTCACCTCTTTGATGATAAG | |
| | GTGATGAAACAGCTTAAACGTCGCCGTTATACTGGTTGGGGACGTTTGTCTCGAAAA | |
| | TTGATTAATGGTATTAGGGATAAGCAATCTGGCAAAACAATATTAGATTTTTTGAAA | |
| | TCAGATGGTTTTGCCAATCGCAATTTTATGCAGCTGATCCATGATGATAGTTTGACA | |
| | TTTAAAGAAGACATTCAAAAAGCACAAGTGTCTGGACAAGGCGATAGTTTACATGAA | |
| | CATATTGCAAATTTAGCTGGTAGCCCTGCTATTAAAAAAGGTATTTTACAGACTGTA | |
| | AAAGTTGTTGATGAATTGGTCAAAGTAATGGGGCGGCATAAGCCAGAAAATATCGTT | |
| | ATTGAAATGGCACGTGAAAATCAGACAACTCAAAAGGGCCAGAAAAATTCGCGAGAG | |
| | CGTATGAAACGAATCGAAGAAGGTATCAAAGAATTAGGAAGTCAGATTCTTAAAGAG | |
| | CATCCTGTTGAAAATACTCAATTGCAAAATGAAAAGCTCTATCTCTATTATCTCCAA | |
| | AATGGAAGAGACATGTATGTGGACCAAGAATTAGATATTAATCGTTTAAGTGATTAT | |
| | GATGTCGATCACATTGTTCCACAAAGTTTCCTTAAAGACGATTCAATAGACAATAAG | |
| | GTCTTAACGCGTTCTGATAAAAATCGTGGTAAATCGGATAACGTTCCAAGTGAAGAA | |
| | GTAGTCAAAAAGATGAAAAACTATTGGAGACAACTTCTAAACGCCAAGTTAATCACT | |
| | CAACGTAAGTTTGATAATTTAACGAAAGCTGAACGTGGAGGTTTGAGTGAACTTGAT | |
| | AAAGCTGGTTTTATCAAACGCCAATTGGTTGAAACTCGCCAAATCACTAAGCATGTG | |
| | GCACAAATTTTGGATAGTCGCATGAATACTAAATACGATGAAAATGATAAACTTATT | |
| | CGAGAGGTTAAAGTGATTACCTTAAAATCTAAATTAGTTTCTGACTTCCGAAAAGAT | |
| | TTCCAATTCTATAAAGTACGTGAGATTAACAATTACCATCATGCCCATGATGCGTAT | |
| | CTAAATGCCGTCGTTGGAACTGCTTTGATTAAGAAATATCCAAAACTTGAATCGGAG | |
| | TTTGTCTATGGTGATTATAAAGTTTATGATGTTCGTAAAATGATTGCTAAGTCTGAG | |
| | CAAGAAATAGGCAAAGCAACCGCAAAATATTTCTTTTACTCTAATATCATGAACTTC | |
| | TTCAAAACAGAAATTACACTTGCAAATGGAGAGATTCGCAAACGCCCTCTAATCGAA | |
| | ACTAATGGGGAAACTGGAGAAATTGTCTGGGATAAAGGGCGAGATTTTGCCACAGTG | |
| | CGCAAAGTATTGTCCATGCCCCAAGTCAATATTGTCAAGAAAACAGAAGTACAGACA | |
| | GGCGGATTCTCCAAGGAGTCAATTTTACCAAAAAGAAATTCGGACAAGCTTATTGCT | |
| | CGTAAAAAAGACTGGGATCCAAAAAAATATGGTGGTTTTGATAGTCCAACGGTAGCT | |
| | TATTCAGTCCTAGTGGTTGCTAAGGTGGAAAAAGGGAAATCGAAGAAGTTAAAATCC | |
| | GTTAAAGAGTTACTAGGGATCACAATTATGGAAAGAAGTTCCTTTGAAAAAAATCCG | |
| | ATTGACTTTTTAGAAGCTAAAGGATATAAGGAAGTTAAAAAAGACTTAATCATTAAA | |
| | CTACCTAAATATAGTCTTTTTGAGTTAGAAAACGGTCGTAAACGGATGCTGGCTAGT | |
| | GCCGGAGAATTACAAAAAGGAAATGAGCTGGCTCTGCCAAGCAAATATGTGAATTTT | |
| | TTATATTTAGCTAGTCATTATGAAAAGTTGAAGGGTAGTCCAGAAGATAACGAACAA | |
| | AAACAATTGTTTGTGGAGCAGCATAAGCATTATTTAGATGAGATTATTGAGCAAATC | |
| | AGTGAATTTTCTAAGCGTGTTATTTTAGCAGATGCCAATTTAGATAAAGTTCTTAGT | |
| | GCATATAACAAACATAGAGACAAACCAATACGTGAACAAGCAGAAAATATTATTCAT | |
| | TTATTTACGTTGACGAATCTTGGAGCTCCCGCTGCTTTTAAATATTTTGATACAACA | |
| | ATTGATCGTAAACGATATACGTCTACAAAAGAAGTTTTAGATGCCACTCTTATCCAT | |
| | CAATCCATCACTGGTCTTTATGAAACACGCATTGATTTGAGTCAGCTAGGAGGTGAC | |
| | TGA | |
| SpCas9 | MDKKYSIGLDIGTNSVGWAVITDEYKVPSKKFKVLGNTDRHSIKKNLIGALLFDSGE | 12 |
| Streptococcus | TAEATRLKRTARRRYTRRKNRICYLQEIFSNEMAKVDDSFFHRLEESFLVEEDKKHE | |
| pyogenes | RHPIFGNIVDEVAYHEKYPTIYHLRKKLVDSTDKADLRLIYLALAHMIKFRGHFLIE | |
| M1GAS wild | GDLNPDNSDVDKLFIQLVQTYNQLFEENPINASGVDAKAILSARLSKSRRLENLIAQ | |
| type | LPGEKKNGLFGNLIALSLGLTPNFKSNFDLAEDAKLQLSKDTYDDDLDNLLAQIGDQ | |
| Encoded | YADLFLAAKNLSDAILLSDILRVNTEITKAPLSASMIKRYDEHHQDLTLLKALVRQQ | |
| product of | LPEKYKEIFFDQSKNGYAGYIDGGASQEEFYKFIKPILEKMDGTEELLVKLNREDLL | |
| NC_002737.2 | RKQRTFDNGSIPHQIHLGELHAILRRQEDFYPFLKDNREKIEKILTFRIPYYVGPLA | |
| (100% | RGNSRFAWMTRKSEETITPWNFEEVVDKGASAQSFIERMTNFDKNLPNEKVLPKHSL | |
| identical to | LYEYFTVYNELTKVKYVTEGMRKPAFLSGEQKKAIVDLLFKTNRKVTVKQLKEDYFK | |
| the | KIECFDSVEISGVEDRFNASLGTYHDLLKIIKDKDFLDNEENEDILEDIVLTLTLFE | |
| canonical | DREMIEERLKTYAHLFDDKVMKQLKRRRYTGWGRLSRKLINGIRDKQSGKTILDFLK | |
| Q99ZW2 | SDGFANRNFMQLIHDDSLTFKEDIQKAQVSGQGDSLHEHIANLAGSPAIKKGILQTV | |
| wild type) | KVVDELVKVMGRHKPENIVIEMARENQTTQKGQKNSRERMKRIEEGIKELGSQILKE | |
| | HPVENTQLQNEKLYLYYLQNGRDMYVDQELDINRLSDYDVDHIVPQSFLKDDSIDNK | |
| | VLTRSDKNRGKSDNVPSEEVVKKMKNYWRQLLNAKLITQRKFDNLTKAERGGLSELD | |
| | KAGFIKRQLVETRQITKHVAQILDSRMNTKYDENDKLIREVKVITLKSKLVSDFRKD | |
| | FQFYKVREINNYHHAHDAYLNAVVGTALIKKYPKLESEFVYGDYKVYDVRKMIAKSE | |
| | QEIGKATAKYFFYSNIMNFFKTEITLANGEIRKRPLIETNGETGEIVWDKGRDFATV | |
| | RKVLSMPQVNIVKKTEVQTGGFSKESILPKRNSDKLIARKKDWDPKKYGGFDSPTVA | |
| | YSVLVVAKVEKGKSKKLKSVKELLGITIMERSSFEKNPIDFLEAKGYKEVKKDLIIK | |
| | LPKYSLFELENGRKRMLASAGELQKGNELALPSKYVNFLYLASHYEKLKGSPEDNEQ | |
| | KQLFVEQHKHYLDEIIEQISEFSKRVILADANLDKVLSAYNKHRDKPIREQAENIIH | |
| | LFTLTNLGAPAAFKYFDTTIDRKRYTSTKEVLDATLIHQSITGLYETRIDLSQLGGD | |

[0405] The base editors described herein may include any of the above SpCas9 sequences, or any variant thereof having at least 80%, at least 85%, at least 90%, at least 95%, or at least 99% sequence identity thereto.

[0406] (2) Wild Type Cas9 Orthologs

[0407] In other embodiments, the Cas9 protein can be a wild type Cas9 ortholog from another bacterial species. For example, the following Cas9 orthologs can be used in connection with the base editor constructs described in this specification. In addition, any variant Cas9 orthologs having at least 80%, at least 85%, at least 90%, at least 95% or at least 99% sequence identity to any of the below orthologs may also be used with the present base editors.

| Description | Sequence |
|---|---|
| LfCas9 | MKEYHIGLDIGTSSIGWAVTDSQFKLMRIKGKTAIGVRLFEEGKTAAERRTFRTTRRRLKRRKWRLHYLDEIFAPHLQEVD |
| Lactobacillus | ENFLRRLKQSNIHPEDPTKNQAFIGKLLFPDLLKKNERGYPTLIKMRDELPVEQRAHYPVMNIYKLREAMINEDRQFDLRE |
| fermentum | VYLAVHHIVKYRGHFLNNASVDKFKVGRIDFDKSFNVLNEAYEELQNGEGSFTIEPSKVEKIGQLLLDTKMRKLDRQKAVA |
| wild type | KLLEVKVADKEETKRNKQIATAMSKLVLGYKADFATVAMANGNEWKIDLSSETSEDEIEKFREELSDAQNDILTEITSLFS |
| GenBank: | QIMLNEIVPNGMSISESMMDRYWTHERQLAEVKEYLATQPASARKEFDQVYNKYIGQAPKERGFDLEKGLKKILSKKENWK |
| SNX31424.11 | EIDELLKAGDFLPKQRTSANGVIPHQMHQQELDRIIEKQAKYYPWLATENPATGERDRHQAKYELDQLVSFRIPYYVGPLV |
| | TPEVQKATSGAKFAWAKRKEDGEITPWNLWDKIDRAESAEAFIKRMTVKDTYLLNEDVLPANSLLYQKYNVLNELNNVRVN |
| | GRRLSVGIKQDIYTELFKKKKTVKASDVASLVMAKTRGVNKPSVEGLSDPKKFNSNLATYLDLKSIVGDKVDDNRYQTDLE |
| | NIIEWRSVFEDGEIFADKLTEVEWLTDEQRSALVKKRYKGWGRLSKKLLTGIVDENGQRIIDLMWNTDQNFKEIVDQPVFK |
| | EQIDQLNQKAITNDGMTLRERVESVLDDAYTSPQNKKAIWQVVRVVEDIVKAVGNAPKSISIEFARNEGNKGEITRSRRTQ |
| | LQKLFEDQAHELVKDTSLTEELEKAPDLSDRYYFYFTQGGKDMYTGDPINFDEISTKYDIDHILPQSFVKDNSLDNRVLTS |
| | RKENNKKSDQVPAKLYAAKMKPYWNQLLKQGLITQRKFENLTKDVDQNIKYRSLGFVKRQLVETRQVIKLTANILGSMYQE |
| | AGTEIIETRAGLTKQLREEFDLPKVREVNDYHHAVDAYLTTFAGQYLNRRYPKLRSFFVYGEYMKFKHGSDLKLRNFNFFH |
| | ELMEGDKSQGKVVDQQTGELITTRDEVAKSFDRLLNMKYMLVSKEVHDRSDQLYGATIVTAKESGKLTSPIEIKKNRLVDL |
| | YGAYTNGTSAFMTIIKFTGNKPKYKVIGIPTTSAASLKRAGKPGSESYNQELHRIIKSNPKVKKGFEIVVPHVSYGQLIVD |
| | GDCKFTLASPTVQHPATQLVLSKKSLETISSGYKILKDKPAIANERLIRVFDEVVGQMNRYFTIFDQRSNRQKVADARDKF |
| | LSLPTESKYEGAKKVQVGKTEVITNLLMGLHANATQGDLKVLGLATFGFFQSTTGLSLSEDTMIVYQSPTGLFERRICLKD |
| | I(SEQ ID NO: 13) |
| SaCas9 | MDKKYSIGLDIGTNSVGWAVITDEYKVPSKKFKVLGNTDRHSIKKNLIGALLFDSGETAEATRLKRTARRRYTRRKNRICY |
| Staphylococcus | LQEIFSNEMAKVDDSFFHRLEESFLVEEDKKHERHPIFGNIVDEVAYHEKYPTIYHLRKKLVDSTDKADLRLIYLALAHMI |
| aureus | KFRGHFLIEGDLNPDNSDVDKLFIQLVQTYNQLFEENPINASGVDAKAILSARLSKSRRLENLIAQLPGEKKNGLFGNLIA |
| wild type | LSLGLTPNFKSNFDLAEDAKLQLSKDTYDDDLDNLLAQIGDQYADLFLAAKNLSDAILLSDILRVNTEITKAPLSASMIKR |
| GenBank: | YDEHHQDLTLLKALVRQQLPEKYKEIFFDQSKNGYAGYIDGGASQEEFYKFIKPILEKMDGTEELLVKLNREDLLRKQRTF |
| AYD60528.1 | DNGSIPHQIHLGELHAILRRQEDFYPFLKDNREKIEKILTFRIPYYVGPLARGNSRFAWMTRKSEETITPWNFEEVVDKGA |
| | SAQSFIERMTNFDKNLPNEKVLPKHSLLYEYFTVYNELTKVKYVTEGMRKPAFLSGEQKKAIVDLLFKTNRKVTVKQLKED |
| | YFKKIECFDSVEISGVEDRFNASLGTYHDLLKIIKDKDFLDNEENEDILEDIVLTLTLFEDREMIEERLKTYAHLFDDKVM |
| | KQLKRRRYTGWGRLSRKLINGIRDKQSGKTILDFLKSDGFANRNFMQLIHDDSLTFKEDIQKAQVSGQGDSLHEHIANLAG |
| | SPAIKKGILQTVKVVDELVKVMGRHKPENIVIEMARENQTTQKGQKNSRERMKRIEEGIKELGSQILKEHPVENTQLQNEK |
| | LYLYYLQNGRDMYVDQELDINRLSDYDVDHIVPQSFLKDDSIDNKVLTRSDKNRGKSDNVPSEEVVKKMKNYWRQLLNAKL |
| | ITQRKFDNLTKAERGGLSELDKAGFIKRQLVETRQITKHVAQILDSRMNTKYDENDKLIREVKVITLKSKLVSDFRKDFQF |
| | YKVREINNYHHAHDAYLNAVVGTALIKKYPKLESEFVYGDYKVYDVRKMIAKSEQEIGKATAKYFFYSNIMNFFKTEITLA |
| | NGEIRKRPLIETNGETGEIVWDKGRDFATVRKVLSMPQVNIVKKTEVQTGGFSKESILPKRNSDKLIARKKDWDPKKYGGF |
| | DSPTVAYSVLVVAKVEKGKSKKLKSVKELLGITIMERSSFEKNPIDFLEAKGYKEVKKDLIIKLPKYSLFELENGRKRMLA |
| | SAGELQKGNELALPSKYVNFLYLASHYEKLKGSPEDNEQKQLFVEQHKHYLDEIIEQISEFSKRVILADANLDKVLSAYNK |
| | HRDKPIREQAENIIHLFTLTNLGAPAAFKYFDTTIDRKRYTSTKEVLDATLIHQSITGLYETRIDLSQLGGD(SEQ ID |
| | NO: 14) |
| SaCas9 | MGKRNYILGLDIGITSVGYGIIDYETRDVIDAGVRLFKEANVENNEGRRSKRGARRLKRRRRHRIQRVKKLLFDYNLLTDH |
| Staphylococcus | SELSGINPYEARVKGLSQKLSEEEFSAALLHLAKRRGVHNVNEVEEDTGNELSTKEQISRNSKALEEKYVAELQLERLKKD |
| aureus | GEVRGSINRFKTSDYVKEAKQLLKVQKAYHQLDQSFIDTYIDLLETRRTYYEGPGEGSPFGWKDIKEWYEMLMGHCTYFPE |
| | ELRSVKYAYNADLYNALNDLNNLVITRDENEKLEYYEKFQIIENVFKQKKKPTLKQIAKEILVNEEDIKGYRVTSTGKPEF |
| | TNLKVYHDIKDITARKEIIENAELLDQIAKILTIYQSSEDIQEELTNLNSELTQEEIEQISNLKGYTGTHNLSLKAINLIL |
| | DELWHTNDNQIAIFNRLKLVPKKVDLSQQKEIPTTLVDDFILSPVVKRSFIQSIKVINAIIKKYGLPNDIIIELAREKNSK |
| | DAQKMINEMQKRNRQTNERIEEIIRTTGKENAKYLIEKIKLHDMQEGKCLYSLEAIPLEDLLNNPFNYEVDHIIPRSVSFD |
| | NSFNNKVLVKQEENSKKGNRTPFQYLSSSDSKISYETFKKHILNLAKGKGRISKTKKEYLLEERDINRFSVQKDFINRNLV |
| | DTRYATRGLMNLLRSYFRVNNLDVKVKSINGGFTSFLRRKWKFKKERNKGYKHHAEDALIIANADFIFKEWKKLDKAKKVM |
| | ENQMFEEKQAESMPEIETEQEYKEIFITPHQIKHIKDFKDYKYSHRVDKKPNRKLINDTLYSTRKDDKGNTLIVNNLNGLY |
| | DKDNDKLKKLINKSPEKLLMYHHDPQTYQKLKLIMEQYGDEKNPLYKYYEETGNYLTKYSKKDNGPVIKKIKYYGNKLNAH |
| | LDITDDYPNSRNKVVKLSLKPYRFDVYLDNGVYKFVTVKNLDVIKKENYYEVNSKCYEEAKKLKKISNQAEFIASFYKNDL |
| | IKINGELYRVIGVNNDLLNRIEVNMIDITYREYLENMNDKRPPHIIKTIASKTQSIKKYSTDILGNLYEVKSKKHPQIIKK |
| | (SEQ ID NO: 15) |
| StCas9 | MLFNKCIIISINLDFSNKEKCMTKPYSIGLDIGTNSVGWAVITDNYKVPSKKMKVLGNTSKKYIKKNLLGVLLFDSGITAE |
| Staphylococcus | GRRLKRTARRRYTRRRNRILYLQEIFSTEMATLDDAFFQRLDDSFLVPDDKRDSKYPIFGNLVEEKVYHDEFPTIYHLRKY |
| thermophilus | LADSTKKADLRLVYLALAHMIKYRGHFLIEGEFNSKNNDIQKNFQDFLDTYNAIFESDLSLENSKQLEEIVKDKISKLEKK |
| UniProtKB/ | DRILKLFPGEKNSGIFSEFLKLIVGNQADFRKCFNLDEKASLHFSKESYDEDLETLLGYIGDDYSDVFLKAKKLYDAILLS |
| Swiss-Prot: | GFLTVTDNETEAPLSSAMIKRYNEHKEDLALLKEYIRNISLKTYNEVFKDDTKNGYAGYIDGKTNQEDFYVYLKNLLAEFE |
| G3ECR1.2 | GADYFLEKIDREDFLRKQRTFDNGSIPYQIHLQEMRAILDKQAKFYPFLAKNKERIEKILTFRIPYYVGPLARGNSDFAWS |
| Wild type | IRKRNEKITPWNFEDVIDKESSAEAFINRMTSFDLYLPEEKVLPKHSLLYETFNVYNELTKVRFIAESMRDYQFLDSKQKK |
| | DIVRLYFKDKRKVTDKDIIEYLHAIYGYDGIELKGIEKQFNSSLSTYHDLLNIINDKEFLDDSSNEAIIEEIIHTLTIFED |
| | REMIKQRLSKFENIFDKSVLKKLSRRHYTGWGKLSAKLINGIRDEKSGNTILDYLIDDGISNRNFMQLIHDDALSFKKKIQ |
| | KAQIIGDEDKGNIKEVVKSLPGSPAIKKGILQSIKIVDELVKVMGGRKPESIVVEMARENQYTNQGKSNSQQRLKRLEKSL |
| | KELGSKILKENIPAKLSKIDNNALQNDRLYLYYLQNGKDMYTGDDLDIDRLSNYDIDHIIPQAFLKDNSIDNKVLVSSASN |
| | RGKSDDFPSLEVVKKRKTFWYQLLKSKLISQRKFDNLTKAERGGLLPEDKAGFIQRQLVETRQITKHVARLLDEKFNNKKD |
| | ENNRAVRTVKIITLKSTLVSQFRKDFELYKVREINDFHHAHDAYLNAVIASALLKKYPKLEPEFVYGDYPKYNSFRERKSA |
| | TEKVYFYSNIMNIFKKSISLADGRVIERPLIEVNEETGESVWNKESDLATVRRVLSYPQVNVVKKVEEQNHGLDRGKPKGL |
| | FNANLSSKPKPNSNENLVGAKEYLDPKKYGGYAGISNSFAVLVKGTIEKGAKKKITNVLEFQGISILDRINYRKDKLNFLL |
| | EKGYKDIELIIELPKYSLFELSDGSRRMLASILSTNNKRGEIHKGNQIFLSQKFVKLLYHAKRISNTINENHRKYVENHKK |
| | EFEELFYYILEFNENYVGAKKNGKLLNSAFQSWQNHSIDELCSSFIGPTGSERKGLFELTSRGSAADFEFLGVKIPRYRDY |
| | TPSSLLKDATLIHQSVTGLYETRIDLAKLGEG(SEQ ID NO: 16) |
| LcCas9 | MKIKNYNLALTPSTSAVGHVEVDDDLNILEPVHHQKAIGVAKFGEGETAEARRLARSARRTTKRRANRINHYFNEIMKPEI |
| Lactobacillus | DKVDPLMFDRIKQAGLSPLDERKEFRTVIFDRPNIASYYHNQFPTIWHLQKYLMITDEKADIRLIYWALHSLLKHRGHFFN |
| crispatus | TTPMSQFKPGKLNLKDDMLALDDYNDLEGLSFAVANSPEIEKVIKDRSMHKKEKIAELKKLIVNDVPDKDLAKRNNKIITQ |
| NCBI | IVNAIMGNSFHLNFIFDMDLDKLTSKAWSFKLDDPELDTKFDAISGSMTDNQIGIFETLQKIYSAISLLDILNGSSNVVDA |
| Reference | KNALYDKHKRDLNLYFKFLNTLPDEIAKTLKAGYTLYIGNRKKDLLAARKLLKVNVAKNFSQDDFYKLINKELKSIDKQGL |
| Sequence: | QTRFSEKVGELVAQNNFLPVQRSSDNVFIPYQLNAITFNKILENQGKYYDFLVKPNPAKKDRKNAPYELSQLMQFTIPYYV |
| WP_133478044.1 | GPLVTPEEQVKSGIPKTSRFAWMVRKDNGAITPWNFYDKVDIEATADKFIKRSIAKDSYLLSELVLPKHSLLYEKYEVFNE |
| Wild type | LSNVSLDGKKLSGGVKQILFNEVFKKTNKVNTSRILKALAKHNIPGSKITGLSNPEEFTSSLQTYNAWKKYFPNQIDNFAY |
| | QQDLEKMIEWSTVFEDHKILAKKLDEIEWLDDDQKKFVANTRLRGWGRLSKRLLTGLKDNYGKSIMQRLETTKANFQQIVY |
| | KPEFREQIDKISQAAAKNQSLEDILANSYTSPSNRKAIRKTMSVVDEYIKLNHGKEPDKIFLMFQRSEQEKGKQTEARSKQ |
| | LNRILSQLKADKSANKLFSKQLADEFSNAIKKSKYKLNDKQYFYFQQLGRDALTGEVIDYDELYKYTVLHIIPRSKLTDDS |
| | QNNKVLTKYKIVDGSVALKFGNSYSDALGMPIKAFWTELNRLKLIPKGKLLNLTTDFSTLNKYQRDGYIARQLVETQQIVK |
| | LLATIMQSRFKHTKIIEVRNSQVANIRYQFDYFRIKNLNEYYRGFDAYLAAVVGTYLYKVYPKARRLFVYGQYLKPKKTNQ |
| | ENQDMHLDSEKKSQGFNFLWNLLYGKQDQIFVNGTDVIAFNRKDLITKMNTVYNYKSQKISLAIDYHNGAMFKATLFPRND |
| | RDTAKTRKLIPKKKDYDTDIYGGYTSNVDGYMLLAEIIKRDGNKQYGFYGVPSRLVSELDTLKKTRYTEYEEKLKEIIKPE |
| | LGVDLKKIKKIKILKNKVPFNQVIIDKGSKFFITSTSYRWNYRQLILSAESQQTLMDLVVDPDFSNHKARKDARKNADERL |
| | IKVYEEILYQVKNYMPMFVELHRCYEKLVDAQKTFKSLKISDKAMVLNQILILLHSNATSPVLEKLGYHTRFTLGKKHNLI |
| | SENAVLVTQSITGLKENHVSIKQML (SEQ ID NO: 17) |
| PdCas9 | MTNEKYSIGLDIGTSSIGFAVVNDNNRVIRVKGKNAIGVRLFDEGKAAADRRSFRTTRRSFRTTRRRLSRRRWRLKLLREI |
| Pedicoccus | FDAYITPVDEAFFIRLKESNLSPKDSKKQYSGDILFNDRSDKDFYEKYPTIYHLRNALMTEHRKFDVREIYLAIHHIMKFR |
| damnosus | GHFLNATPANNFKVGRLNLEEKFEELNDIYQRVFPDESIEFRTDNLEQIKEVLLDNKRSRADRQRTLVSDIYQSSEDKDIE |
| NCBI | KRNKAVATEILKASLGNKAKLNVITNVEVDKEAAKEWSITFDSESIDDDLAKIEGQMTDDGHEIIEVLRSLYSGITLSAIV |
| Reference | PENHTLSQSMVAKYDLHKDHLKLFKKLINGMTDTKKAKNLRAAYDGYIDGVKGKVLPQEDFYKQVQVNLDDSAEANEIQTY |
| Sequence: | IDQDIFMPKQRTKANGSIPHQLQQQELDQIIENQKAYYPWLAELNPNPDKKRQQLAKYKLDELVTFRVPYYVGPMITAKDQ |
| WP_062913273.1 | KNQSGAEFAWMIRKEPGNITPWNFDQKVDRMATANQFIKRMTTTDTYLLGEDVLPAQSLLYQKFEVLNELNKIRIDHKPIS |
| Wild type | IEQKQQIFNDLFKQFKNVTIKHLQDYLVSQGQYSKRPLIEGLADEKRFNSSLSTYSDLCGIFGAKLVEENDRQEDLEKIIE |
| | WSTIFEDKKIYRAKLNDLTWLTDDQKEKLATKRYQGWGRLSRKLLVGLKNSEHRNIMDILWITNENFMQIQAEPDFAKLVT |
| | DANKGMLEKTDSQDVINDLYTSPQNKKAIRQILLVVHDIQNAMHGQAPAKIHVEFARGEERNPRRSVQRQRQVEAAYEKVS |
| | NELVSAKVRQEFKEAINNKRDFKDRLFLYFMQGGIDIYTGKQLNIDQLSSYQIDHILPQAFVKDDSLTNRVLTNENQVKAD |
| | SVPIDIFGKKMLSVWGRMKDQGLISKGKYRNLTMNPENISAHTENGFINRQLVETRQVIKLAVNILADEYGDSTQIISVKA |
| | DLSHQMREDFELLKNRDVNDYHHAFDAYLAAFIGNYLLKRYPKLESYFVYGDFKKFTQKETKMRRFNFIYDLKHCDQVVNK |
| | ETGEILWTKDEDIKYIRHLFAYKKILVSHEVREKRGALYNQTIYKAKDDKGSGQESKKLIRIKDDKETKIYGGYSGKSLAY |
| | MTIVQITKKNKVSYRVIGIPTLALARLNKLENDSTENNGELYKIIKPQFTHYKVDKKNGEIIETTDDFKIVVSKVRFQQLI |
| | DDAGQFFMLASDTYKNNAQQLVISNNALKAINNTNITDCPRDDLERLDNLRLDSAFDEIVKKMDKYFSAYDANNFREKIRN |
| | SNLIFYQLPVEDQWENNKITELGKRTVLTRILQGLHANATTTDMSIFKIKTPFGQLRQRSGISLSENAQLIYQSPTGLFER |
| | RVQLNKIK (SEQ ID NO: 18) |
| FnCas9 | MKKQKFSDYYLGFDIGTNSVGWCVTDLDYNVLRFNKKDMWGSRLFEEAKTAAERRVQRNSRRRLKRRKWRLNLLEEIFSNE |
| Fusobaterium | ILKIDSNFFRRLKESSLWLEDKSSKEKFTLFNDDNYKDYDFYKQYPTIFHLRNELIKNPEKKDIRLVYLAIHSIFKSRGHF |
| nucleatum | LFEGQNLKEIKNFETLYNNLIAFLEDNGINKIIDKNNIEKLEKIVCDSKKGLKDKEKEFKEIFNSDKQLVAIFKLSVGSSV |
| NCBI | SLNDLFDTDEYKKGEVEKEKISFREQIYEDDKPIYYSILGEKIELLDIAKTFYDFMVLNNILADSQYISEAKVKLYEEHKK |
| Reference | DLKNLKYIIRKYNKGNYDKLFKDKNENNYSAYIGLNKEKSKKEVIEKSRLKIDDLIKNIKGYLPKVEEIEEKDKAIFNKIL |
| Sequence: | NKIELKTILPKQRISDNGTLPYQIHEAELEKILENQSKYYDFLNYEENGIITKDKLLMTFKFRIPYYVGPLNSYHKDKGGN |
| WP_060798984.1 | SWIVRKEEGKILPWNFEQKVDIEKSAEEFIKRMTNKCTYLNGEDVIPKDTFLYSEYVILNELNKVQVNDEFLNEENKRKII |
| | DELFKENKKVSEKKFKEYLLVKQIVDGTIELKGVKDSFNSNYISYIRFKDIFGEKLNLDIYKEISEKSILWKCLYGDDKKI |
| | FEKKIKNEYGDILTKDEIKKINTFKFNNWGRLSEKLLTGIEFINLETGECYSSVMDALRRTNYNLMELLSSKFTLQESINN |
| | ENKEMNEASYRDLIEESYVSPSLKRAIFQTLKIYEEIRKITGRVPKKVFIEMARGGDESMKNKKIPARQEQLKKLYDSCGN |
| | DIANFSIDIKEMKNSLISYDNNSLRQKKLYLYYLQFGKCMYTGREIDLDRLLQNNDTYDIDHIYPRSKVIKDDSFDNLVLV |
| | LKNENAEKSNEYPVKKEIQEKMKSFWRFLKEKNFISDEKYKRLTGKDDFELRGFMARQLVNVRQTTKEVGKILQQIEPEIK |
| | IVYSKAEIASSFREMFDFIKVRELNDTHHAKDAYLNIVAGNVYNTKFTEKPYRYLQEIKENYDVKKIYNYDIKNAWDKENS |
| | LEIVKKNMEKNTVNITRFIKEKKGQLFDLNPIKKGETSNEIISIKPKVYNGKDDKLNEKYGYYKSLNPAYFLYVEHKEKNK |
| | RIKSFERVNLVDVNNIKDEKSLVKYLIENKKLVEPRVIKKVYKRQVILINDYPYSIVTLDSNKLMDFENLKPLFLENKYEK |
| | ILKNVIKFLEDNQGKSEENYKFIYLKKKDRYEKNETLESVKDRYNLEFNEMYDKFLEKLDSKDYKNYMNNKKYQELLDVKE |
| | KFIKLNLFDKAFTLKSFLDLFNRKTMADFSKVGLTKYLGKIQKISSNVLSKNELYLLEESVTGLFVKKIKL (SEQ ID |
| | NO: 19) |
| EcCas9 | MNKYYLGLDMGSASVGWAVTDENYHLVRRKGKDLWGVRTFDVAQTAKERRITRGNRRRQDRRKQRIQILQELLGEEVLKTD |
| Enterococcus | PGFFHRMKESRYVVEDKRTLDGKQVELPYALFVDKDYTDKEYYKQFPTINHLIVYLMTTSDTPDIRLVYLALHYYMKNRGN |
| cecorum | FLHSGDINNVKDINDILEQLDNVLETFLDGWNLKLKSYVEDIKNIYNRDLGRGERKKAFVNTLGAKTKAEKAFCSLISGGS |
| NCBI | TNLAELFDDSSLKEIETPKIEFASSSLEDKIDGIQEALEDRFAVIEAAKRLYDWKTLTDILGDSSSLAEARVNSYQMHHEQ |
| Reference | LLELKSLVKEYLDRKVFQEVFVSLNVANNYPAYIGHTKINGKKKELEVKRTKRNDFYSYVKKQVIEPIKKKVSDEAVLTKL |
| Sequence: | SEIESLIEVDKYLPLQVNSDNGVIPYQVKLNELTRIFDNLENRIPVLRENRDKIIKTFKFRIPYYVGSLNGVVKNGKCTNW |
| WP_047338501.1 | MVRKEEGKIYPWNFEDKVDLEASAEQFIRRMTNKCTYLVNEDVLPKYSLLYSKYLVLSELNNLRIDGRPLDVKIKQDIYEN |
| Wild type | VFKKNRKVTLKKIKKYLLKEGIITDDDELSGLADDVKSSLTAYRDFKEKLGHLDLSEAQMENIILNITLFGDDKKLLKKRL |
| | AALYPFIDDKSLNRIATLNYRDWGRLSERFLSGITSVDQETGELRTIIQCMYETQANLMQLLAEPYHFVEAIEKENPKVDL |
| | ESISYRIVNDLYVSPAVKRQIWQTLLVIKDIKQVMKHDPERIFIEMAREKQESKKTKSRKQVLSEVYKKAKEYEHLFEKLN |
| | SLTEEQLRSKKIYLYFTQLGKCMYSGEPIDFENLVSANSNYDIDHIYPQSKTIDDSFNNIVLVKKSLNAYKSNHYPIDKNI |
| | RDNEKVKTLWNTLVSKGLITKEKYERLIRSTPFSDEELAGFIARQLVETRQSTKAVAEILSNWFPESEIVYSKAKNVSNFR |
| | QDFEILKVRELNDCHHAHDAYLNIVVGNAYHTKFTNSPYRFIKNKANQEYNLRKLLQKVNKIESNGVVAWVGQSENNPGTI |
| | ATVKKVIRRNTVLISRMVKEVDGQLFDLTLMKKGKGQVPIKSSDERLTDISKYGGYNKATGAYFTFVKSKKRGKVVRSFEY |
| | VPLHLSKQFENNNELLKEYIEKDRGLTDVEILIPKVLINSLFRYNGSLVRITGRGDTRLLLVHEQPLYVSNSFVQQLKSVS |
| | SYKLKKSENDNAKLTKTATEKLSNIDELYDGLLRKLDLPIYSYWFSSIKEYLVESRTKYIKLSIEEKALVIFEILHLFQSD |
| | AQVPNLKILGLSTKPSRIRIQKNLKDTDKMSIIHQSPSGIFEHEIELTSL (SEQ ID NO: 20) |
| AhCas9 | MQNGFLGITVSSEQVGWAVTNPKYELERASRKDLWGVRLFDKAETAEDRRMFRTNRRLNQRKKNRIHYLRDIFHEEVNQKD |
| Anaerostipes | PNFFQQLDESNFCEDDRTVEFNFDTNLYKNQFPTVYHLRKYLMETKDKPDIRLVYLAFSKFMKNRGHFLYKGNLGEVMDFE |
| hadrus | NSMKGFCESLEKFNIDFPTLSDEQVKEVRDILCDHKIAKTVKKKNIITITKVKSKTAKAWIGLFCGCSVPVKVLFQDIDEE |
| NCBI | IVTDPEKISFEDASYDDYIANIEKGVGIYYEAIVSAKMLFDWSILNEILGDHQLLSDAMIAEYNKHHDDLKRLQKIIKGTG |
| Reference | SRELYQDIFINDVSGNYVCYVGHAKTMSSADQKQFYTFLKNRLKNVNGISSEDAEWIDTEIKNGTLLPKQTKRDNSVIPHQ |
| Sequence: | LQLREFELILDNMQEMYPFLKENREKLLKIFNFVIPYYVGPLKGVVRKGESTNWMVPKKDGVIHPWNFDEMVDKEASAECF |
| WP_044924278.1 | ISRMTGNCSYLFNEKVLPKNSLLYETFEVLNELNPLKINGEPISVELKQRIYEQLFLTGKKVTKKSLTKYLIKNGYDKDIE |
| Wild type | LSGIDNEFHSNLKSHIDFEDYDNLSDEEVEQIILRITVFEDKQLLKDYLNREFVKLSEDERKQICSLSYKGWGNLSEMLLN |
| | GITVTDSNGVEVSVMDMLWNTNLNLMQILSKKYGYKAEIEHYNKEHEKTIYNREDLMDYLNIPPAQRRKVNQLITIVKSLK |
| | KTYGVPNKIFFKISREHQDDPKRTSSRKEQLKYLYKSLKSEDEKHLMKELDELNDHELSNDKVYLYFLQKGRCIYSGKKLN |
| | LSRLRKSNYQNDIDYIYPLSAVNDRSMNNKVLTGIQENRADKYTYFPVDSEIQKKMKGFWMELVLQGFMTKEKYFRLSREN |
| | DFSKSELVSFIEREISDNQQSGRMIASVLQYYFPESKIVFVKEKLISSFKRDFHLISSYGHNHLQAAKDAYITIVVGNVYH |
| | TKFTMDPAIYFKNHKRKDYDLNRLFLENISRDGQIAWESGPYGSIQTVRKEYAQNHIAVTKRVVEVKGGLFKQMPLKKGHG |
| | EYPLKTNDPRFGNIAQYGGYTNVTGSYFVLVESMEKGKKRISLEYVPVYLHERLEDDPGHKLLKEYLVDHRKLNHPKILLA |
| | KVRKNSLLKIDGFYYRLNGRSGNALILTNAVELIMDDWQTKTANKISGYMKRRAIDKKARVYQNEFHIQELEQLYDFYLDK |
| | LKNGVYKNRKNNQAELIHNEKEQFMELKTEDQCVLLTEIKKLFVCSPMQADLTLIGGSKHTGMIAMSSNVTKADFAVIAED |
| | PLGLRNKVIYSHKGEK (SEQ ID NO: 21) |
| KvCas9 | MSQNNNKIYNIGLDIGDASVGWAVVDEHYNLLKRHGKHMWGSRLFTQANTAVERRSSRSTRRRYNKRRERIRLLREIMEDM |
| Kandleria | VLDVDPTFFIRLANVSFLDQEDKKDYLKENYHSNYNLFIDKDFNDKTYYDKYPTIYHLRKHLCESKEKEDPRLIYLALHHI |
| vitulina | VKYRGNFLYEGQKFSMDVSNIEDKMIDVLRQFNEINLFEYVEDRKKIDEVLNVLKEPLSKKHKAEKAFALFDTTKDNKAAY |
| NCBI | KELCAALAGNKFNVTKMLKEAELHDEDEKDISFKFSDATFDDAFVEKQPLLGDCVEFIDLLHDIYSWVELQNILGSAHTSE |
| Reference | PSISAAMIQRYEDHKNDLKLLKDVIRKYLPKKYFEVFRDEKSKKNNYCNYINHPSKTPVDEFYKYIKKLIEKIDDPDVKTI |
| Sequence: | LNKIELESFMLKQNSRTNGAVPYQMQLDELNKILENQSVYYSDLKDNEDKIRSILTFRIPYYFGPLNITKDRQFDWIIKKE |
| WP_031589969.1 | GKENERILPWNANEIVDVDKTADEFIKRMRNFCTYFPDEPVMAKNSLTVSKYEVLNEINKLRINDHLIKRDMKDKMLHTLF |
| Wild type | MDHKSISANAMKKWLVKNQYFSNTDDIKIEGFQKENACSTSLTPWIDFTKIFGKINESNYDFIEKIIYDVTVFEDKKILRR |
| | RLKKEYDLDEEKIKKILKLKYSGWSRLSKKLLSGIKTKYKDSTRTPETVLEVMERTNMNLMQVINDEKLGFKKTIDDANST |
| | SVSGKFSYAEVQELAGSPAIKRGIWQALLIVDEIKKIMKHEPAHVYIEFARNEDEKERKDSFVNQMLKLYKDYDFEDETEK |
| | EANKHLKGEDAKSKIRSERLKLYYTQMGKCMYTGKSLDIDRLDTYQVDHIVPQSLLKDDSIDNKVLVLSSENQRKLDDLVI |
| | PSSIRNKMYGFWEKLFNNKIISPKKFYSLIKTEFNEKDQERFINRQIVETRQITKHVAQIIDNHYENTKVVTVRADLSHQF |
| | RERYHIYKNRDINDFHHAHDAYIATILGTYIGHRFESLDAKYIYGEYKRIFRNQKNKGKEMKKNNDGFILNSMRNIYADKD |
| | TGEIVWDPNYIDRIKKCFYYKDCFVTKKLEENNGTFFNVTVLPNDTNSDKDNTLATVPVNKYRSNVNKYGGFSGVNSFIVA |
| | IKGKKKKGKKVIEVNKLTGIPLMYKNADEEIKINYLKQAEDLEEVQIGKEILKNQLIEKDGGLYYIVAPTEIINAKQLILN |
| | ESQTKLVCEIYKAMKYKNYDNLDSEKIIDLYRLLINKMELYYPEYRKQLVKKFEDRYEQLKVISIEEKCNIIKQILATLHC |
| | NSSIGKIMYSDFKISTTIGRLNGRTISLDDISFIAESPTGMYSKKYKL (SEQ ID NO: 22) |
| EfCas9 | MRLFEEGHTAEDRRLKRTARRRISRRRNRLRYLQAFFEEAMTDLDENFFARLQESFLVPEDKKWHRHPIFAKLEDEVAYHE |
| Enterococcus | TYPTIYHLRKKLADSSEQADLRLIYLALAHIVKYRGHFLIEGKLSTENTSVKDQFQQFMVIYNQTFVNGESRLVSAPLPES |
| faecalis | VLIEEELTEKASRTKKSEKVLQQFPQEKANGLFGQFLKLMVGNKADFKKVFGLEEEAKITYASESYEEDLEGILAKVGDEY |
| NCBI | SDVFLAAKNVYDAVELSTILADSDKKSHAKLSSSMIVRFTEHQEDLKKFKRFIRENCPDEYDNLFKNEQKDGYAGYIAHAG |
| Reference | KVSQLKFYQYVKKIIQDIAGAEYFLEKIAQENFLRKQRTFDNGVIPHQIHLAELQAIIHRQAAYYPFLKENQEKIEQLVTF |
| Sequence: | RIPYYVGPLSKGDASTFAWLKRQSEEPIRPWNLQETVDLDQSATAFIERMTNFDTYLPSEKVLPKHSLLYEKFMVFNELTK |
| WP_016631044.1 | ISYTDDRGIKANFSGKEKEKIFDYLFKTRRKVKKKDIIQFYRNEYNTEIVTLSGLEEDQFNASFSTYQDLLKCGLTRAELD |
| Wild type | HPDNAEKLEDIIKILTIFEDRQRIRTQLSTFKGQFSAEVLKKLERKHYTGWGRLSKKLINGIYDKESGKTILDYLVKDDGV |
| | SKHYNRNFMQLINDSQLSFKNAIQKAQSSEHEETLSETVNELAGSPAIKKGIYQSLKIVDELVAIMGYAPKRIVVEMAREN |
| | QTTSTGKRRSIQRLKIVEKAMAEIGSNLLKEQPTTNEQLRDTRLFLYYMQNGKDMYTGDELSLHRLSHYDIDHIIPQSFMK |
| | DDSLDNLVLVGSTENRGKSDDVPSKEVVKDMKAYWEKLYAAGLISQRKFQRLTKGEQGGLTLEDKAHFIQRQLVETRQITK |
| | NVAGILDQRYNAKSKEKKVQIITLKASLTSQFRSIFGLYKVREVNDYHHGQDAYLNCVVATTLLKVYPNLAPEFVYGEYPK |
| | FQTFKENKATAKAIIYTNLLRFFTEDEPRFTKDGEILWSNSYLKTIKKELNYHQMNIVKKVEVQKGGFSKESIKPKGPSNK |
| | LIPVKNGLDPQKYGGFDSPVVAYTVLFTHEKGKKPLIKQEILGITIMEKTRFEQNPILFLEEKGFLRPRVLMKLPKYTLYE |
| | FPEGRRRLLASAKEAQKGNQMVLPEHLLTLLYHAKQCLLPNQSESLAYVEQHQPEFQEILERVVDFAEVHTLAKSKVQQIV |
| | KLFEANQTADVKEIAASFIQLMQFNAMGAPSTFKFFQKDIERARYTSIKEIFDATIIYQSPTGLYETRRKVVD (SEQ ID |
| | NO: 23) |
| Staphylococcus | KRNYILGLDIGITSVGYGIIDYETRDVIDAGVRLFKEANVENNEGRRSKRGARRLKRRRRHRIQRVKKLLFDYNLLTDHSE |
| aureus | LSGINPYEARVKGLSQKLSEEEFSAALLHLAKRRGVHNVNEVEEDTGNELSTKEQISRNSKALEEKYVAELQLERLKKDGE |
| Cas9 | VRGSINRFKTSDYVKEAKQLLKVQKAYHQLDQSFIDTYIDLLETRRTYYEGPGEGSPFGWKDIKEWYEMLMGHCTYFPEEL |
| | RSVKYAYNADLYNALNDLNNLVITRDENEKLEYYEKFQIIENVFKQKKKPTLKQIAKEILVNEEDIKGYRVTSTGKPEFTN |
| | LKVYHDIKDITARKEIIENAELLDQIAKILTIYQSSEDIQEELTNLNSELTQEEIEQISNLKGYTGTHNLSLKAINLILDE |
| | LWHTNDNQIAIFNRLKLVPKKVDLSQQKEIPTTLVDDFILSPVVKRSFIQSIKVINAIIKKYGLPNDIIIELAREKNSKDA |
| | QKMINEMQKRNRQTNERIEEIIRTTGKENAKYLIEKIKLHDMQEGKCLYSLEAIPLEDLLNNPFNYEVDHIIPRSVSFDNS |
| | FNNKVLVKQEENSKKGNRTPFQYLSSSDSKISYETFKKHILNLAKGKGRISKTKKEYLLEERDINRFSVQKDFINRNLVDT |
| | RYATRGLMNLLRSYFRVNNLDVKVKSINGGFTSFLRRKWKFKKERNKGYKHHAEDALIIANADFIFKEWKKLDKAKKVMEN |
| | QMFEEKQAESMPEIETEQEYKEIFITPHQIKHIKDFKDYKYSHRVDKKPNRELINDTLYSTRKDDKGNTLIVNNLNGLYDK |
| | DNDKLKKLINKSPEKLLMYHHDPQTYQKLKLIMEQYGDEKNPLYKYYEETGNYLTKYSKKDNGPVIKKIKYYGNKLNAHLD |
| | ITDDYPNSRNKVVKLSLKPYRFDVYLDNGVYKFVTVKNLDVIKKENYYEVNSKCYEEAKKLKKISNQAEFIASFYNNDLIK |
| | INGELYRVIGVNNDLLNRIEVNMIDITYREYLENMNDKRPPRIIKTIASKTQSIKKYSTDILGNLYEVKSKKHPQIIKKG |
| | (SEQ ID NO: 24) |
| Geobacillus | MKYKIGLDIGITSIGWAVINLDIPRIEDLGVRIFDRAENPKTGESLALPRRLARSARRRLRRRKHRLERIRRLFVREGILT |
| thermodenitrifleans | KEELNKLFEKKHEIDVWQLRVEALDRKLNNDELARILLHLAKRRGFRSNRKSERTNKENSTMLKHIEENQSILSSYRTVAE |
| Cas9 | MVVKDPKFSLHKRNKEDNYTNTVARDDLEREIKLIFAKQREYGNIVCTEAFEHEYISIWASQRPFASKDDIEKKVGFCTFE |
| | PKEKRAPKATYTFQSFTVWEHINKLRLVSPGGIRALTDDERRLIYKQAFHKNKITFHDVRTLLNLPDDTRFKGLLYDRNTT |
| | LKENEKVRFLELGAYHKIRKAIDSVYGKGAAKSFRPIDFDTFGYALTMFKDDTDIRSYLRNEYEQNGKRMENLADKVYDEE |
| | LIEELLNLSFSKFGHLSLKALRNILPYMEQGEVYSTACERAGYTFTGPKKKQKTVLLPNIPPIANPVVMRALTQARKVVNA |
| | IIKKYGSPVSIHIELARELSQSFDERRKMQKEQEGNRKKNETAIRQLVEYGLTLNPTGLDIVKFKLWSEQNGKCAYSLQPI |
| | EIERLLEPGYTEVDHVIPYSRSLDDSYTNKVLVLTKENREKGNRTPAEYLGLGSERWQQFETFVLTNKQFSKKKRDRLLRL |
| | HYDENEENEFKNRNLNDTRYISRFLANFIREHLKFADSDDKQKVYTVNGRITAHLRSRWNFNKNREESNLHHAVDAAIVAC |
| | TTPSDIARVTAFYQRREQNKELSKKTDPQFPQPWPHFADELQARLSKNPKESIKALNLGNYDNEKLESLQPVFVSRMPKRS |
| | ITGAAHQETLRRYIGIDERSGKIQTVVKKKLSEIQLDKTGHFPMYGKESDPRTYEAIRQRLLEHNNDPKKAFQEPLYKPKK |
| | NGELGPIIRTIKIIDTTNQVIPLNDGKTVAYNSNIVRVDVFEKDGKYYCVPIYTIDMMKGILPNKAIEPNKPYSEWKEMTE |
| | DYTFRFSLYPNDLIRIEFPREKTIKTAVGEEIKIKDLFAYYQTIDSSNGGLSLVSHDNNFSLRSIGSRTLKRFEKYQVDVL |
| | GNIYKVRGEKRVGVASSSHSKAGETIRPL |
| | (SEQ ID NO: 25) |
| ScCas9 | MEKKYSIGLDIGTNSVGWAVITDDYKVPSKKFKVLGNTNRKSIKKNLMGALLFDSGETAEATRLKRTARRRYTRRKNRIRY |
| S. canis | LQEIFANEMAKLDDSFFQRLEESFLVEEDKKNERHPIFGNLADEVAYHRNYPTIYHLRKKLADSPEKADLRLIYLALAHII |
| 1375 AA | KFRGHFLIEGKLNAENSDVAKLFYQLIQTYNQLFEESPLDEIEVDAKGILSARLSKSKRLEKLIAVFPNEKKNGLFGNIIA |
| 159.2 kDa | LALGLTPNFKSNFDLTEDAKLQLSKDTYDDDLDELLGQIGDQYADLFSAAKNLSDAILLSDILRSNSEVTKAPLSASMVKR |
| | YDEHHQDLALLKTLVRQQFPEKYAEIFKDDTKNGYAGYVGIGIKHRKRTTKLATQEEFYKFIKPILEKMDGAEELLAKLNR |
| | DDLLRKQRTFDNGSIPHQIHLKELHAILRRQEEFYPFLKENREKIEKILTFRIPYYVGPLARGNSRFAWLTRKSEEAITPW |
| | NFEEVVDKGASAQSFIERMTNFDEQLPNKKVLPKHSLLYEYFTVYNELTKVKYVTERMRKPEFLSGEQKKAIVDLLFKTNR |
| | KVTVKQLKEDYFKKIECFDSVEIIGVEDRFNASLGTYHDLLKIIKDKDFLDNEENEDILEDIVLTLTLFEDREMIEERLKT |
| | YAHLFDDKVMKQLKRRHYTGWGRLSRKMINGIRDKQSGKTILDFLKSDGFSNRNFMQLIHDDSLTFKEEIEKAQVSGQGDS |
| | LHEQIADLAGSPAIKKGILQTVKIVDELVKVMGHKPENIVIEMARENQTTTKGLQQSRERKKRIEEGIKELESQILKENPV |
| | ENTQLQNEKLYLYYLQNGRDMYVDQELDINRLSDYDVDHIVPQSFIKDDSIDNKVLTRSVENRGKSDNVPSEEVVKKMKNY |
| | WRQLLNAKLITQRKFDNLTKAERGGLSEADKAGFIKRQLVETRQITKHVARILDSRMNTKRDKNDKPIREVKVITLKSKLV |
| | SDFRKDFQLYKVRDINNYHHAHDAYLNAVVGTALIKKYPKLESEFVYGDYKVYDVRKMIAKSEQEIGKATAKRFFYSNIMN |
| | FFKTEVKLANGEIRKRPLIETNGETGEVVWNKEKDFATVRKVLAMPQVNIVKKTEVQTGGFSKESILSKRESAKLIPRKKG |
| | WDTRKYGGFGSPTVAYSILVVAKVEKGKAKKLKSVKVLVGITIMEKGSYEKDPIGFLEAKGYKDIKKELIFKLPKYSLFEL |
| | ENGRRRMLASATELQKANELVLPQHLVRLLYYTQNISATTGSNNLGYIEQHREEFKEIFEKIIDFSEKYILKNKVNSNLKS |
| | SFDEQFAVSDSILLSNSFVSLLKYTSFGASGGFTFLDLDVKQGRLRYQTVTEVLDATLIYQSITGLYETRTDLSQLGGD |
| | (SEQ ID NO: 26) |

[0408] The base editors described herein may include any of the above Cas9 ortholog sequences, or any variants thereof having at least 80%, at least 85%, at least 90%, at least 95%, or at least 99% sequence identity thereto.

[0409] The napDNAbp may include any suitable homologs and/or orthologs or naturally occurring enzymes, such as, Cas9. Cas9 homologs and/or orthologs have been described in various species, including, but not limited to, S. pyogenes and S. thermophilus. Preferably, the Cas moiety is configured (e.g., mutagenized, recombinantly engineered, or otherwise obtained from nature) as a nickase, i.e., capable of cleaving only a single strand of the target doubpdditional suitable Cas9 nucleases and sequences will be apparent to those of skill in the art based on this disclosure, and such Cas9 nucleases and sequences include Cas9 sequences from the organisms and loci disclosed in Chylinski, Rhun, and Charpentier, “The tracrRNA and Cas9 families of type II CRISPR-Cas immunity systems” (2013) RNA Biology 10:5, 726-737; the entire contents of which are incorporated herein by reference. In some embodiments, a Cas9 nuclease has an inactive (e.g., an inactivated) DNA cleavage domain, that is, the Cas9 is a nickase. In some embodiments, the Cas9 protein comprises an amino acid sequence that is at least 80% identical to the amino acid sequence of a Cas9 protein as provided by any one of the variants of Table 3. In some embodiments, the Cas9 protein comprises an amino acid sequence that is at least 85%, at least 90%, at least 92%, at least 95%, at least 96%, at least 97%, at least 98%, at least 99%, or at least 99.5% identical to the amino acid sequence of a Cas9 protein as provided by any one of the Cas9 orthologs in the above tables.

[0410] (3) Dead Cas9 Variant

[0411] In certain embodiments, the base editors described herein may include a dead Cas9, e.g., dead SpCas9, which has no nuclease activity due to one or more mutations that inactive both nuclease domains of Cas9, namely the RuvC domain (which cleaves the non-protospacer DNA strand) and HNH domain (which cleaves the protospacer DNA strand). The nuclease inactivation may be due to one or mutations that result in one or more substitutions and/or deletions in the amino acid sequence of the encoded protein, or any variants thereof having at least 80%, at least 85%, at least 90%, at least 95%, or at least 99% sequence identity thereto.

[0412] As used herein, the term “dCas9” refers to a nuclease-inactive Cas9 or nuclease-dead Cas9, or a functional fragment thereof, and embraces any naturally occurring dCas9 from any organism, any naturally-occurring dCas9 equivalent or functional fragment thereof, any dCas9 homolog, ortholog, or paralog from any organism, and any mutant or variant of a dCas9, naturally-occurring or engineered. The term dCas9 is not meant to be particularly limiting and may be referred to as a “dCas9 or equivalent.” Exemplary dCas9 proteins and method for making dCas9 proteins are further described herein and/or are described in the art and are incorporated herein by reference.

[0413] In other embodiments, dCas9 corresponds to, or comprises in part or in whole, a Cas9 amino acid sequence having one or more mutations that inactivate the Cas9 nuclease activity. In other embodiments, Cas9 variants having mutations other than D10A and H840A are provided which may result in the full or partial inactivate of the endogenous Cas9 nuclease activity (e.g., nCas9 or dCas9, respectively). Such mutations, by way of example, include other amino acid substitutions at D10 and H820, or other substitutions within the nuclease domains of Cas9 (e.g., substitutions in the HNH nuclease subdomain and/or the RuvC1 subdomain) with reference to a wild type sequence such as Cas9 from Streptococcus pyogenes (NCBI Reference Sequence: NC_017053.1). In some embodiments, variants or homologues of Cas9 (e.g., variants of Cas9 from Streptococcus pyogenes (NCBI Reference Sequence: NC_017053.1)) are provided which are at least about 70% identical, at least about 80% identical, at least about 90% identical, at least about 95% identical, at least about 98% identical, at least about 99% identical, at least about 99.5% identical, or at least about 99.9% identical to NCBI Reference Sequence: NC_017053.1. In some embodiments, variants of dCas9 (e.g., variants of NCBI Reference Sequence: NC_017053.1) are provided having amino acid sequences which are shorter, or longer than NC_017053.1 by about 5 amino acids, by about 10 amino acids, by about 15 amino acids, by about 20 amino acids, by about 25 amino acids, by about 30 amino acids, by about 40 amino acids, by about 50 amino acids, by about 75 amino acids, by about 100 amino acids or more.

[0414] In one embodiment, the dead Cas9 may be based on the canonical SpCas9 sequence of Q99ZW2 and may have the following sequence, which comprises a D10A and an H810A substitutions (underlined and bolded), or a variant be variant of SEQ ID NO: 27 having at least 80%, at least 85%, at least 90%, at least 95%, or at least 99% sequence identity thereto:

| Description | Sequence | SEQ ID NO: |
|---|---|---|
| dead Cas9 or | MDKKYSIGL [symbol] IGTNSVGWAVITDEYKVPSKKFKVLGNTDRHSIKKNLIGALLFDSGETA | 27 |
| dCas9 | EATRLKRTARRRYTRRKNRICYLQEIFSNEMAKVDDSFFHRLEESFLVEEDKKHERHPI | |
| Streptococcus | FGNIVDEVAYHEKYPTIYHLRKKLVDSTDKADLRLIYLALAHMIKFRGHFLIEGDLNPD | |
| pyogenes | NSDVDKLFIQLVQTYNQLFEENPINASGVDAKAILSARLSKSRRLENLIAQLPGEKKNG | |
| Q992W2 Cas9 | LFGNLIALSLGLTPNFKSNFDLAEDAKLQLSKDTYDDDLDNLLAQIGDQYADLFLAAKN | |
| with D10X | LSDAILLSDILRVNTEITKAPLSASMIKRYDEHHQDLTLLKALVRQQLPEKYKEIFFDQ | |
| and H810 [symbol] | SKNGYAGYIDGGASQEEFYKFIKPILEKMDGTEELLVKLNREDLLRKQRTFDNGSIPHQ | |
| Where “X” is | IHLGELHAILRRQEDFYPFLKDNREKIEKILTFRIPYYVGPLARGNSRFAWMTRKSEET | |
| any amino | ITPWNFEEVVDKGASAQSFIERMTNFDKNLPNEKVLPKHSLLYEYFTVYNELTKVKYVT | |
| acid | EGMRKPAFLSGEQKKAIVDLLFKTNRKVTVKQLKEDYFKKIECFDSVEISGVEDRFNAS | |
| | LGTYHDLLKIIKDKDFLDNEENEDILEDIVLTLTLFEDREMIEERLKTYAHLFDDKVMK | |
| | QLKRRRYTGWGRLSRKLINGIRDKQSGKTILDFLKSDGFANRNFMQLIHDDSLTFKEDI | |
| | QKAQVSGQGDSLHEHIANLAGSPAIKKGILQTVKVVDELVKVMGRHKPENIVIEMAREN | |
| | QTTQKGQKNSRERMKRIEEGIKELGSQILKEHPVENTQLQNEKLYLYYLQNGRDMYVDQ | |
| | ELDINRLSDYDVD [symbol] IVPQSFLKDDSIDNKVLTRSDKNRGKSDNVPSEEVVKKMKNYWRQ | |
| | LLNAKLITQRKFDNLTKAERGGLSELDKAGFIKRQLVETRQITKHVAQILDSRMNTKYD | |
| | ENDKLIREVKVITLKSKLVSDFRKDFQFYKVREINNYHHAHDAYLNAVVGTALIKKYPK | |
| | LESEFVYGDYKVYDVRKMIAKSEQEIGKATAKYFFYSNIMNFFKTEITLANGEIRKRPL | |
| | IETNGETGEIVWDKGRDFATVRKVLSMPQVNIVKKTEVQTGGFSKESILPKRNSDKLIA | |
| | RKKDWDPKKYGGFDSPTVAYSVLVVAKVEKGKSKKLKSVKELLGITIMERSSFEKNPID | |
| | FLEAKGYKEVKKDLIIKLPKYSLFELENGRKRMLASAGELQKGNELALPSKYVNFLYLA | |
| | SHYEKLKGSPEDNEQKQLFVEQHKHYLDEIIEQISEFSKRVILADANLDKVLSAYNKHR | |
| | DKPIREQAENIIHLFTLTNLGAPAAFKYFDTTIDRKRYTSTKEVLDATLIHQSITGLYE | |
| | TRIDLSQLGGD | |
| dead Cas9 or | MDKKYSIGL [symbol] IGTNSVGWAVITDEYKVPSKKFKVLGNTDRHSIKKNLIGALLFDSGETA | 28 |
| dCas9 | EATRLKRTARRRYTRRKNRICYLQEIFSNEMAKVDDSFFHRLEESFLVEEDKKHERHPI | |
| Streptococcus | FGNIVDEVAYHEKYPTIYHLRKKLVDSTDKADLRLIYLALAHMIKFRGHFLIEGDLNPD | |
| pyogenes | NSDVDKLFIQLVQTYNQLFEENPINASGVDAKAILSARLSKSRRLENLIAQLPGEKKNG | |
| Q992W2 Cas9 | LFGNLIALSLGLTPNFKSNFDLAEDAKLQLSKDTYDDDLDNLLAQIGDQYADLFLAAKN | |
| with D10 [symbol] | LSDAILLSDILRVNTEITKAPLSASMIKRYDEHHQDLTLLKALVRQQLPEKYKEIFFDQ | |
| and H810 [symbol] | SKNGYAGYIDGGASQEEFYKFIKPILEKMDGTEELLVKLNREDLLRKQRTFDNGSIPHQ | |
| | IHLGELHAILRRQEDFYPFLKDNREKIEKILTFRIPYYVGPLARGNSRFAWMTRKSEET | |
| | ITPWNFEEVVDKGASAQSFIERMTNFDKNLPNEKVLPKHSLLYEYFTVYNELTKVKYVT | |
| | EGMRKPAFLSGEQKKAIVDLLFKTNRKVTVKQLKEDYFKKIECFDSVEISGVEDRFNAS | |
| | LGTYHDLLKIIKDKDFLDNEENEDILEDIVLTLTLFEDREMIEERLKTYAHLFDDKVMK | |
| | QLKRRRYTGWGRLSRKLINGIRDKQSGKTILDFLKSDGFANRNFMQLIHDDSLTFKEDI | |
| | QKAQVSGQGDSLHEHIANLAGSPAIKKGILQTVKVVDELVKVMGRHKPENIVIEMAREN | |
| | QTTQKGQKNSRERMKRIEEGIKELGSQILKEHPVENTQLQNEKLYLYYLQNGRDMYVDQ | |
| | ELDINRLSDYDVD [symbol] IVPQSFLKDDSIDNKVLTRSDKNRGKSDNVPSEEVVKKMKNYWRQ | |
| | LLNAKLITQRKFDNLTKAERGGLSELDKAGFIKRQLVETRQITKHVAQILDSRMNTKYD | |
| | ENDKLIREVKVITLKSKLVSDFRKDFQFYKVREINNYHHAHDAYLNAVVGTALIKKYPK | |
| | LESEFVYGDYKVYDVRKMIAKSEQEIGKATAKYFFYSNIMNFFKTEITLANGEIRKRPL | |
| | IETNGETGEIVWDKGRDFATVRKVLSMPQVNIVKKTEVQTGGFSKESILPKRNSDKLIA | |
| | RKKDWDPKKYGGFDSPTVAYSVLVVAKVEKGKSKKLKSVKELLGITIMERSSFEKNPID | |
| | FLEAKGYKEVKKDLIIKLPKYSLFELENGRKRMLASAGELQKGNELALPSKYVNFLYLA | |
| | SHYEKLKGSPEDNEQKQLFVEQHKHYLDEIIEQISEFSKRVILADANLDKVLSAYNKHR | |
| | DKPIREQAENIIHLFTLTNLGAPAAFKYFDTTIDRKRYTSTKEVLDATLIHQSITGLYE | |
| | TRIDLSQLGGD | |

[0415] (4) Cas9 Nickase Variant

[0416] In one embodiment, the base editors described herein comprise a Cas9 nickase. The term “Cas9 nickase” of “nCas9” refers to a variant of Cas9 which is capable of introducing a single-strand break in a double strand DNA molecule target. In some embodiments, the Cas9 nickase comprises only a single functioning nuclease domain. The wild type Cas9 (e.g., the canonical SpCas9) comprises two separate nuclease domains, namely, the RuvC domain (which cleaves the non-protospacer DNA strand) and HNH domain (which cleaves the protospacer DNA strand). In one embodiment, the Cas9 nickase comprises a mutation in the RuvC domain which inactivates the RuvC nuclease activity. For example, mutations in aspartate (D) 10, histidine (H) 983, aspartate (D) 986, or glutamate (E) 762, have been reported as loss-of-function mutations of the RuvC nuclease domain and the creation of a functional Cas9 nickase (e.g., Nishimasu et al., “Crystal structure of Cas9 in complex with guide RNA and target DNA,” Cell 156(5), 935-949, which is incorporated herein by reference). Thus, nickase mutations in the RuvC domain could include D10X, H983X, D986X, or E762X, wherein X is any amino acid other than the wild type amino acid. In certain embodiments, the nickase could be D10A, of H983A, or D986A, or E762A, or a combination thereof.

[0417] In various embodiments, the Cas9 nickase can having a mutation in the RuvC nuclease domain and have one of the following amino acid sequences, or a variant thereof having an amino acid sequence that has at least 80%, at least 85%, at least 90%, at least 95%, or at least 99% sequence identity thereto.

| Description | Sequence | SEQ ID NO: |
|---|---|---|
| Cas9 nickase | MDKKYSIGL [symbol] IGTNSVGWAVITDEYKVPSKKFKVLGNTDRHSIKKNLIGALLFDSGETA | 29 |
| Streptococcus | EATRLKRTARRRYTRRKNRICYLQEIFSNEMAKVDDSFFHRLEESFLVEEDKKHERHPI | |
| pyogenes | FGNIVDEVAYHEKYPTIYHLRKKLVDSTDKADLRLIYLALAHMIKFRGHFLIEGDLNPD | |
| Q99ZW2 Cas9 | NSDVDKLFIQLVQTYNQLFEENPINASGVDAKAILSARLSKSRRLENLIAQLPGEKKNG | |
| with D10 [symbol] , | LFGNLIALSLGLTPNFKSNFDLAEDAKLQLSKDTYDDDLDNLLAQIGDQYADLFLAAKN | |
| wherein X is | LSDAILLSDILRVNTEITKAPLSASMIKRYDEHHQDLTLLKALVRQQLPEKYKEIFFDQ | |
| any | SKNGYAGYIDGGASQEEFYKFIKPILEKMDGTEELLVKLNREDLLRKQRTFDNGSIPHQ | |
| alternate | IHLGELHAILRRQEDFYPFLKDNREKIEKILTFRIPYYVGPLARGNSRFAWMTRKSEET | |
| amino acid | ITPWNFEEVVDKGASAQSFIERMTNFDKNLPNEKVLPKHSLLYEYFTVYNELTKVKYVT | |
| | EGMRKPAFLSGEQKKAIVDLLFKTNRKVTVKQLKEDYFKKIECFDSVEISGVEDRFNAS | |
| | LGTYHDLLKIIKDKDFLDNEENEDILEDIVLTLTLFEDREMIEERLKTYAHLFDDKVMK | |
| | QLKRRRYTGWGRLSRKLINGIRDKQSGKTILDFLKSDGFANRNFMQLIHDDSLTFKEDI | |
| | QKAQVSGQGDSLHEHIANLAGSPAIKKGILQTVKVVDELVKVMGRHKPENIVIEMAREN | |
| | QTTQKGQKNSRERMKRIEEGIKELGSQILKEHPVENTQLQNEKLYLYYLQNGRDMYVDQ | |
| | ELDINRLSDYDVDHIVPQSFLKDDSIDNKVLTRSDKNRGKSDNVPSEEVVKKMKNYWRQ | |
| | LLNAKLITQRKFDNLTKAERGGLSELDKAGFIKRQLVETRQITKHVAQILDSRMNTKYD | |
| | ENDKLIREVKVITLKSKLVSDFRKDFQFYKVREINNYHHAHDAYLNAVVGTALIKKYPK | |
| | LESEFVYGDYKVYDVRKMIAKSEQEIGKATAKYFFYSNIMNFFKTEITLANGEIRKRPL | |
| | IETNGETGEIVWDKGRDFATVRKVLSMPQVNIVKKTEVQTGGFSKESILPKRNSDKLIA | |
| | RKKDWDPKKYGGFDSPTVAYSVLVVAKVEKGKSKKLKSVKELLGITIMERSSFEKNPID | |
| | FLEAKGYKEVKKDLIIKLPKYSLFELENGRKRMLASAGELQKGNELALPSKYVNFLYLA | |
| | SHYEKLKGSPEDNEQKQLFVEQHKHYLDEIIEQISEFSKRVILADANLDKVLSAYNKHR | |
| | DKPIREQAENIIHLFTLTNLGAPAAFKYFDTTIDRKRYTSTKEVLDATLIHQSITGLYE | |
| | TRIDLSQLGGD | |
| Cas9 nickase | MDKKYSIGLDIGTNSVGWAVITDEYKVPSKKFKVLGNTDRHSIKKNLIGALLFDSGETA | 30 |
| Streptococcus | EATRLKRTARRRYTRRKNRICYLQEIFSNEMAKVDDSFFHRLEESFLVEEDKKHERHPI | |
| pyogenes | FGNIVDEVAYHEKYPTIYHLRKKLVDSTDKADLRLIYLALAHMIKFRGHFLIEGDLNPD | |
| Q99ZW2 Cas9 | NSDVDKLFIQLVQTYNQLFEENPINASGVDAKAILSARLSKSRRLENLIAQLPGEKKNG | |
| with E762X, | LFGNLIALSLGLTPNFKSNFDLAEDAKLQLSKDTYDDDLDNLLAQIGDQYADLFLAAKN | |
| wherein X is | LSDAILLSDILRVNTEITKAPLSASMIKRYDEHHQDLTLLKALVRQQLPEKYKEIFFDQ | |
| any | SKNGYAGYIDGGASQEEFYKFIKPILEKMDGTEELLVKLNREDLLRKQRTFDNGSIPHQ | |
| alternate | IHLGELHAILRRQEDFYPFLKDNREKIEKILTFRIPYYVGPLARGNSRFAWMTRKSEET | |
| amino acid | ITPWNFEEVVDKGASAQSFIERMTNFDKNLPNEKVLPKHSLLYEYFTVYNELTKVKYVT | |
| | EGMRKPAFLSGEQKKAIVDLLFKTNRKVTVKQLKEDYFKKIECFDSVEISGVEDRFNAS | |
| | LGTYHDLLKIIKDKDFLDNEENEDILEDIVLTLTLFEDREMIEERLKTYAHLFDDKVMK | |
| | QLKRRRYTGWGRLSRKLINGIRDKQSGKTILDFLKSDGFANRNFMQLIHDDSLTFKEDI | |
| | QKAQVSGQGDSLHEHIANLAGSPAIKKGILQTVKVVDELVKVMGRHKPENIVI [symbol] MAREN | |
| | QTTQKGQKNSRERMKRIEEGIKELGSQILKEHPVENTQLQNEKLYLYYLQNGRDMYVDQ | |
| | ELDINRLSDYDVDHIVPQSFLKDDSIDNKVLTRSDKNRGKSDNVPSEEVVKKMKNYWRQ | |
| | LLNAKLITQRKFDNLTKAERGGLSELDKAGFIKRQLVETRQITKHVAQILDSRMNTKYD | |
| | ENDKLIREVKVITLKSKLVSDFRKDFQFYKVREINNYHHAHDAYLNAVVGTALIKKYPK | |
| | LESEFVYGDYKVYDVRKMIAKSEQEIGKATAKYFFYSNIMNFFKTEITLANGEIRKRPL | |
| | IETNGETGEIVWDKGRDFATVRKVLSMPQVNIVKKTEVQTGGFSKESILPKRNSDKLIA | |
| | RKKDWDPKKYGGFDSPTVAYSVLVVAKVEKGKSKKLKSVKELLGITIMERSSFEKNPID | |
| | FLEAKGYKEVKKDLIIKLPKYSLFELENGRKRMLASAGELQKGNELALPSKYVNFLYLA | |
| | SHYEKLKGSPEDNEQKQLFVEQHKHYLDEIIEQISEFSKRVILADANLDKVLSAYNKHR | |
| | DKPIREQAENIIHLFTLTNLGAPAAFKYFDTTIDRKRYTSTKEVLDATLIHQSITGLYE | |
| | TRIDLSQLGGD | |
| Cas9 nickase | MDKKYSIGLDIGTNSVGWAVITDEYKVPSKKFKVLGNTDRHSIKKNLIGALLFDSGETA | 31 |
| Streptococcus | EATRLKRTARRRYTRRKNRICYLQEIFSNEMAKVDDSFFHRLEESFLVEEDKKHERHPI | |
| pyogenes | FGNIVDEVAYHEKYPTIYHLRKKLVDSTDKADLRLIYLALAHMIKFRGHFLIEGDLNPD | |
| Q992W2 Cas9 | NSDVDKLFIQLVQTYNQLFEENPINASGVDAKAILSARLSKSRRLENLIAQLPGEKKNG | |
| with H983X, | LFGNLIALSLGLTPNFKSNFDLAEDAKLQLSKDTYDDDLDNLLAQIGDQYADLFLAAKN | |
| wherein X is | LSDAILLSDILRVNTEITKAPLSASMIKRYDEHHQDLTLLKALVRQQLPEKYKEIFFDQ | |
| any | SKNGYAGYIDGGASQEEFYKFIKPILEKMDGTEELLVKLNREDLLRKQRTFDNGSIPHQ | |
| alternate | IHLGELHAILRRQEDFYPFLKDNREKIEKILTFRIPYYVGPLARGNSRFAWMTRKSEET | |
| amino acid | ITPWNFEEVVDKGASAQSFIERMTNFDKNLPNEKVLPKHSLLYEYFTVYNELTKVKYVT | |
| | EGMRKPAFLSGEQKKAIVDLLFKTNRKVTVKQLKEDYFKKIECFDSVEISGVEDRFNAS | |
| | LGTYHDLLKIIKDKDFLDNEENEDILEDIVLTLTLFEDREMIEERLKTYAHLFDDKVMK | |
| | QLKRRRYTGWGRLSRKLINGIRDKQSGKTILDFLKSDGFANRNFMQLIHDDSLTFKEDI | |
| | QKAQVSGQGDSLHEHIANLAGSPAIKKGILQTVKVVDELVKVMGRHKPENIVIEMAREN | |
| | QTTQKGQKNSRERMKRIEEGIKELGSQILKEHPVENTQLQNEKLYLYYLQNGRDMYVDQ | |
| | ELDINRLSDYDVDHIVPQSFLKDDSIDNKVLTRSDKNRGKSDNVPSEEVVKKMKNYWRQ | |
| | LLNAKLITQRKFDNLTKAERGGLSELDKAGFIKRQLVETRQITKHVAQILDSRMNTKYD | |
| | ENDKLIREVKVITLKSKLVSDFRKDFQFYKVREINNYH [symbol] AHDAYLNAVVGTALIKKYPK | |
| | LESEFVYGDYKVYDVRKMIAKSEQEIGKATAKYFFYSNTMNFFKTEITLANGEIRKRPL | |
| | IETNGETGEIVWDKGRDFATVRKVLSMPQVNIVKKTEVQTGGFSKESILPKRNSDKLIA | |
| | RKKDWDPKKYGGFDSPTVAYSVLVVAKVEKGKSKKLKSVKELLGITIMERSSFEKNPID | |
| | FLEAKGYKEVKKDLIIKLPKYSLFELENGRKRMLASAGELQKGNELALPSKYVNFLYLA | |
| | SHYEKLKGSPEDNEQKQLFVEQHKHYLDEIIEQISEFSKRVILADANLDKVLSAYNKHR | |
| | DKPIREQAENIIHLFTLTNLGAPAAFKYFDTTIDRKRYTSTKEVLDATLIHQSITGLYE | |
| | TRIDLSQLGGD | |
| Cas9 nickase | MDKKYSIGLDIGTNSVGWAVITDEYKVPSKKFKVLGNTDRHSIKKNLIGALLFDSGETA | 32 |
| Streptococcus | EATRLKRTARRRYTRRKNRICYLQEIFSNEMAKVDDSFFHRLEESFLVEEDKKHERHPI | |
| pyogenes | FGNIVDEVAYHEKYPTIYHLRKKLVDSTDKADLRLIYLALAHMIKFRGHFLIEGDLNPD | |
| Q992W2 Cas9 | NSDVDKLFIQLVQTYNQLFEENPINASGVDAKAILSARLSKSRRLENLIAQLPGEKKNG | |
| with D986X, | LFGNLIALSLGLTPNFKSNFDLAEDAKLQLSKDTYDDDLDNLLAQIGDQYADLFLAAKN | |
| wherein X is | LSDAILLSDILRVNTEITKAPLSASMIKRYDEHHQDLTLLKALVRQQLPEKYKEIFFDQ | |
| any | SKNGYAGYIDGGASQEEFYKFIKPILEKMDGTEELLVKLNREDLLRKQRTFDNGSIPHQ | |
| alternate | IHLGELHAILRRQEDFYPFLKDNREKIEKILTFRIPYYVGPLARGNSRFAWMTRKSEET | |
| amino acid | ITPWNFEEVVDKGASAQSFIERMTNFDKNLPNEKVLPKHSLLYEYFTVYNELTKVKYVT | |
| | EGMRKPAFLSGEQKKAIVDLLFKTNRKVTVKQLKEDYFKKIECFDSVEISGVEDRFNAS | |
| | LGTYHDLLKIIKDKDFLDNEENEDILEDIVLTLTLFEDREMIEERLKTYAHLFDDKVMK | |
| | QLKRRRYTGWGRLSRKLINGIRDKQSGKTILDFLKSDGFANRNFMQLIHDDSLTFKEDI | |
| | QKAQVSGQGDSLHEHIANLAGSPAIKKGILQTVKVVDELVKVMGRHKPENIVIEMAREN | |
| | QTTQKGQKNSRERMKRIEEGIKELGSQILKEHPVENTQLQNEKLYLYYLQNGRDMYVDQ | |
| | ELDINRLSDYDVDHIVPQSFLKDDSIDNKVLTRSDKNRGKSDNVPSEEVVKKMKNYWRQ | |
| | LLNAKLITQRKFDNLTKAERGGLSELDKAGFIKRQLVETRQITKHVAQILDSRMNTKYD | |
| | ENDKLIREVKVITLKSKLVSDFRKDFQFYKVREINNYHHAH [symbol] AYLNAVVGTALIKKYPK | |
| | LESEFVYGDYKVYDVRKMIAKSEQEIGKATAKYFFYSNIMNFFKTEITLANGEIRKRPL | |
| | IETNGETGEIVWDKGRDFATVRKVLSMPQVNIVKKTEVQTGGFSKESILPKRNSDKLIA | |
| | RKKDWDPKKYGGFDSPTVAYSVLVVAKVEKGKSKKLKSVKELLGITIMERSSFEKNPID | |
| | FLEAKGYKEVKKDLIIKLPKYSLFELENGRKRMLASAGELQKGNELALPSKYVNFLYLA | |
| | SHYEKLKGSPEDNEQKQLFVEQHKHYLDEIIEQISEFSKRVILADANLDKVLSAYNKHR | |
| | DKPIREQAENIIHLFTLTNLGAPAAFKYFDTTIDRKRYTSTKEVLDATLIHQSITGLYE | |
| | TRIDLSQLGGD | |
| Cas9 nickase | MDKKYSIGL [symbol] IGTNSVGWAVITDEYKVPSKKFKVLGNTDRHSIKKNLIGALLFDSGETA | 33 |
| Streptococcus | EATRLKRTARRRYTRRKNRICYLQEIFSNEMAKVDDSFFHRLEESFLVEEDKKHERHPI | |
| pyogenes | FGNIVDEVAYHEKYPTIYHLRKKLVDSTDKADLRLIYLALAHMIKFRGHFLIEGDLNPD | |
| Q992W2 Cas9 | NSDVDKLFIQLVQTYNQLFEENPINASGVDAKAILSARLSKSRRLENLIAQLPGEKKNG | |
| with D10 [symbol] | LFGNLIALSLGLTPNFKSNFDLAEDAKLQLSKDTYDDDLDNLLAQIGDQYADLFLAAKN | |
| | LSDAILLSDILRVNTEITKAPLSASMIKRYDEHHQDLTLLKALVRQQLPEKYKEIFFDQ | |
| | SKNGYAGYIDGGASQEEFYKFIKPILEKMDGTEELLVKLNREDLLRKQRTFDNGSIPHQ | |
| | IHLGELHAILRRQEDFYPFLKDNREKIEKILTFRIPYYVGPLARGNSRFAWMTRKSEET | |
| | ITPWNFEEVVDKGASAQSFIERMTNFDKNLPNEKVLPKHSLLYEYFTVYNELTKVKYVT | |
| | EGMRKPAFLSGEQKKAIVDLLFKTNRKVTVKQLKEDYFKKIECFDSVEISGVEDRFNAS | |
| | LGTYHDLLKIIKDKDFLDNEENEDILEDIVLTLTLFEDREMIEERLKTYAHLFDDKVMK | |
| | QLKRRRYTGWGRLSRKLINGIRDKQSGKTILDFLKSDGFANRNFMQLIHDDSLTFKEDI | |
| | QKAQVSGQGDSLHEHIANLAGSPAIKKGILQTVKVVDELVKVMGRHKPENIVIEMAREN | |
| | QTTQKGQKNSRERMKRIEEGIKELGSQILKEHPVENTQLQNEKLYLYYLQNGRDMYVDQ | |
| | ELDINRLSDYDVDHIVPQSFLKDDSIDNKVLTRSDKNRGKSDNVPSEEVVKKMKNYWRQ | |
| | LLNAKLITQRKFDNLTKAERGGLSELDKAGFIKRQLVETRQITKHVAQILDSRMNTKYD | |
| | ENDKLIREVKVITLKSKLVSDFRKDFQFYKVREINNYHHAHDAYLNAVVGTALIKKYPK | |
| | LESEFVYGDYKVYDVRKMIAKSEQEIGKATAKYFFYSNIMNFFKTEITLANGEIRKRPL | |
| | IETNGETGEIVWDKGRDFATVRKVLSMPQVNIVKKTEVQTGGFSKESILPKRNSDKLIA | |
| | RKKDWDPKKYGGFDSPTVAYSVLVVAKVEKGKSKKLKSVKELLGITIMERSSFEKNPID | |
| | FLEAKGYKEVKKDLIIKLPKYSLFELENGRKRMLASAGELQKGNELALPSKYVNFLYLA | |
| | SHYEKLKGSPEDNEQKQLFVEQHKHYLDEIIEQISEFSKRVILADANLDKVLSAYNKHR | |
| | DKPIREQAENIIHLFTLTNLGAPAAFKYFDTTIDRKRYTSTKEVLDATLIHQSITGLYE | |
| | TRIDLSQLGGD | |
| Cas9 nickase | MDKKYSIGLDIGTNSVGWAVITDEYKVPSKKFKVLGNTDRHSIKKNLIGALLFDSGETA | 34 |
| Streptococcus | EATRLKRTARRRYTRRKNRICYLQEIFSNEMAKVDDSFFHRLEESFLVEEDKKHERHPI | |
| pyogenes | FGNIVDEVAYHEKYPTIYHLRKKLVDSTDKADLRLIYLALAHMIKFRGHFLIEGDLNPD | |
| Q992W2 Cas9 | NSDVDKLFIQLVQTYNQLFEENPINASGVDAKAILSARLSKSRRLENLIAQLPGEKKNG | |
| with E762A | LFGNLIALSLGLTPNFKSNFDLAEDAKLQLSKDTYDDDLDNLLAQIGDQYADLFLAAKN | |
| | LSDAILLSDILRVNTEITKAPLSASMIKRYDEHHQDLTLLKALVRQQLPEKYKEIFFDQ | |
| | SKNGYAGYIDGGASQEEFYKFIKPILEKMDGTEELLVKLNREDLLRKQRTFDNGSIPHQ | |
| | IHLGELHAILRRQEDFYPFLKDNREKIEKILTFRIPYYVGPLARGNSRFAWMTRKSEET | |
| | ITPWNFEEVVDKGASAQSFIERMTNFDKNLPNEKVLPKHSLLYEYFTVYNELTKVKYVT | |
| | EGMRKPAFLSGEQKKAIVDLLFKTNRKVTVKQLKEDYFKKIECFDSVEISGVEDRFNAS | |
| | LGTYHDLLKIIKDKDFLDNEENEDILEDIVLTLTLFEDREMIEERLKTYAHLFDDKVMK | |
| | QLKRRRYTGWGRLSRKLINGIRDKQSGKTILDFLKSDGFANRNFMQLIHDDSLTFKEDI | |
| | QKAQVSGQGDSLHEHIANLAGSPAIKKGILQTVKVVDELVKVMGRHKPENIVI [symbol] MAREN | |
| | QTTQKGQKNSRERMKRIEEGIKELGSQILKEHPVENTQLQNEKLYLYYLQNGRDMYVDQ | |
| | ELDINRLSDYDVDHIVPQSFLKDDSIDNKVLTRSDKNRGKSDNVPSEEVVKKMKNYWRQ | |
| | LLNAKLITQRKFDNLTKAERGGLSELDKAGFIKRQLVETRQITKHVAQILDSRMNTKYD | |
| | ENDKLIREVKVITLKSKLVSDFRKDFQFYKVREINNYHHAHDAYLNAVVGTALIKKYPK | |
| | LESEFVYGDYKVYDVRKMIAKSEQEIGKATAKYFFYSNIMNFFKTEITLANGEIRKRPL | |
| | IETNGETGEIVWDKGRDFATVRKVLSMPQVNIVKKTEVQTGGFSKESILPKRNSDKLIA | |
| | RKKDWDPKKYGGFDSPTVAYSVLVVAKVEKGKSKKLKSVKELLGITIMERSSFEKNPID | |
| | FLEAKGYKEVKKDLIIKLPKYSLFELENGRKRMLASAGELQKGNELALPSKYVNFLYLA | |
| | SHYEKLKGSPEDNEQKQLFVEQHKHYLDEIIEQISEFSKRVILADANLDKVLSAYNKHR | |
| | DKPIREQAENIIHLFTLTNLGAPAAFKYFDTTIDRKRYTSTKEVLDATLIHQSITGLYE | |
| | TRIDLSQLGGD | |
| Cas9 nickase | MDKKYSIGLDIGTNSVGWAVITDEYKVPSKKFKVLGNTDRHSIKKNLIGALLFDSGETA | 35 |
| Streptococcus | EATRLKRTARRRYTRRKNRICYLQEIFSNEMAKVDDSFFHRLEESFLVEEDKKHERHPI | |
| pyogenes | FGNIVDEVAYHEKYPTIYHLRKKLVDSTDKADLRLIYLALAHMIKFRGHFLIEGDLNPD | |
| Q99ZW2 Cas9 | NSDVDKLFIQLVQTYNQLFEENPINASGVDAKAILSARLSKSRRLENLIAQLPGEKKNG | |
| with H983A | LFGNLIALSLGLTPNFKSNFDLAEDAKLQLSKDTYDDDLDNLLAQIGDQYADLFLAAKN | |
| | LSDAILLSDILRVNTEITKAPLSASMIKRYDEHHQDLTLLKALVRQQLPEKYKEIFFDQ | |
| | SKNGYAGYIDGGASQEEFYKFIKPILEKMDGTEELLVKLNREDLLRKQRTFDNGSIPHQ | |
| | IHLGELHAILRRQEDFYPFLKDNREKIEKILTFRIPYYVGPLARGNSRFAWMTRKSEET | |
| | ITPWNFEEVVDKGASAQSFIERMTNFDKNLPNEKVLPKHSLLYEYFTVYNELTKVKYVT | |
| | EGMRKPAFLSGEQKKAIVDLLFKTNRKVTVKQLKEDYFKKIECFDSVEISGVEDRFNAS | |
| | LGTYHDLLKIIKDKDFLDNEENEDILEDIVLTLTLFEDREMIEERLKTYAHLFDDKVMK | |
| | QLKRRRYTGWGRLSRKLINGIRDKQSGKTILDFLKSDGFANRNFMQLIHDDSLTFKEDI | |
| | QKAQVSGQGDSLHEHIANLAGSPAIKKGILQTVKVVDELVKVMGRHKPENIVIEMAREN | |
| | QTTQKGQKNSRERMKRIEEGIKELGSQILKEHPVENTQLQNEKLYLYYLQNGRDMYVDQ | |
| | ELDINRLSDYDVDHIVPQSFLKDDSIDNKVLTRSDKNRGKSDNVPSEEVVKKMKNYWRQ | |
| | LLNAKLITQRKFDNLTKAERGGLSELDKAGFIKRQLVETRQITKHVAQILDSRMNTKYD | |
| | ENDKLIREVKVITLKSKLVSDFRKDFQFYKVREINNYH [symbol] AHDAYLNAVVGTALIKKYPK | |
| | LESEFVYGDYKVYDVRKMIAKSEQEIGKATAKYFFYSNTMNFFKTEITLANGEIRKRPL | |
| | IETNGETGEIVWDKGRDFATVRKVLSMPQVNIVKKTEVQTGGFSKESILPKRNSDKLIA | |
| | RKKDWDPKKYGGFDSPTVAYSVLVVAKVEKGKSKKLKSVKELLGITIMERSSFEKNPID | |
| | FLEAKGYKEVKKDLIIKLPKYSLFELENGRKRMLASAGELQKGNELALPSKYVNFLYLA | |
| | SHYEKLKGSPEDNEQKQLFVEQHKHYLDEIIEQISEFSKRVILADANLDKVLSAYNKHR | |
| | DKPIREQAENIIHLFTLTNLGAPAAFKYFDTTIDRKRYTSTKEVLDATLIHQSITGLYE | |
| | TRIDLSQLGGD | |
| Cas9 nickase | MDKKYSIGLDIGTNSVGWAVITDEYKVPSKKFKVLGNTDRHSIKKNLIGALLFDSGETA | 36 |
| Streptococcus | EATRLKRTARRRYTRRKNRICYLQEIFSNEMAKVDDSFFHRLEESFLVEEDKKHERHPI | |
| pyogenes | FGNIVDEVAYHEKYPTIYHLRKKLVDSTDKADLRLIYLALAHMIKFRGHFLIEGDLNPD | |
| Q99ZW2 Cas9 | NSDVDKLFIQLVQTYNQLFEENPINASGVDAKAILSARLSKSRRLENLIAQLPGEKKNG | |
| with D986A | LFGNLIALSLGLTPNFKSNFDLAEDAKLQLSKDTYDDDLDNLLAQIGDQYADLFLAAKN | |
| | LSDAILLSDILRVNTEITKAPLSASMIKRYDEHHQDLTLLKALVRQQLPEKYKEIFFDQ | |
| | SKNGYAGYIDGGASQEEFYKFIKPILEKMDGTEELLVKLNREDLLRKQRTFDNGSIPHQ | |
| | IHLGELHAILRRQEDFYPFLKDNREKIEKILTFRIPYYVGPLARGNSRFAWMTRKSEET | |
| | ITPWNFEEVVDKGASAQSFIERMTNFDKNLPNEKVLPKHSLLYEYFTVYNELTKVKYVT | |
| | EGMRKPAFLSGEQKKAIVDLLFKTNRKVTVKQLKEDYFKKIECFDSVEISGVEDRFNAS | |
| | LGTYHDLLKIIKDKDFLDNEENEDILEDIVLTLTLFEDREMIEERLKTYAHLFDDKVMK | |
| | QLKRRRYTGWGRLSRKLINGIRDKQSGKTILDFLKSDGFANRNFMQLIHDDSLTFKEDI | |
| | QKAQVSGQGDSLHEHIANLAGSPAIKKGILQTVKVVDELVKVMGRHKPENIVIEMAREN | |
| | QTTQKGQKNSRERMKRIEEGIKELGSQILKEHPVENTQLQNEKLYLYYLQNGRDMYVDQ | |
| | ELDINRLSDYDVDHIVPQSFLKDDSIDNKVLTRSDKNRGKSDNVPSEEVVKKMKNYWRQ | |
| | LLNAKLITQRKFDNLTKAERGGLSELDKAGFIKRQLVETRQITKHVAQILDSRMNTKYD | |
| | ENDKLIREVKVITLKSKLVSDFRKDFQFYKVREINNYHHAH [symbol] AYLNAVVGTALIKKYPK | |
| | LESEFVYGDYKVYDVRKMIAKSEQEIGKATAKYFFYSNIMNFFKTEITLANGEIRKRPL | |
| | IETNGETGEIVWDKGRDFATVRKVLSMPQVNIVKKTEVQTGGFSKESILPKRNSDKLIA | |
| | RKKDWDPKKYGGFDSPTVAYSVLVVAKVEKGKSKKLKSVKELLGITIMERSSFEKNPID | |
| | FLEAKGYKEVKKDLIIKLPKYSLFELENGRKRMLASAGELQKGNELALPSKYVNFLYLA | |
| | SHYEKLKGSPEDNEQKQLFVEQHKHYLDEIIEQISEFSKRVILADANLDKVLSAYNKHR | |
| | DKPIREQAENIIHLFTLTNLGAPAAFKYFDTTIDRKRYTSTKEVLDATLIHQSITGLYE | |
| | TRIDLSQLGGD | |

[0418] In another embodiment, the Cas9 nickase comprises a mutation in the HNH domain which inactivates the HNH nuclease activity. For example, mutations in histidine (H) 840 or asparagine (R) 863 have been reported as loss-of-function mutations of the HNH nuclease domain and the creation of a functional Cas9 nickase (e.g., Nishimasu et al., “Crystal structure of Cas9 in complex with guide RNA and target DNA,” Cell 156(5), 935-949, which is incorporated herein by reference). Thus, nickase mutations in the HNH domain could include H840X and R863X, wherein X is any amino acid other than the wild type amino acid. In certain embodiments, the nickase could be H840A or R863A or a combination thereof.

[0419] In various embodiments, the Cas9 nickase can have a mutation in the HNH nuclease domain and have one of the following amino acid sequences, or a variant thereof having an amino acid sequence that has at least 80%, at least 85%, at least 90%, at least 95%, or at least 99% sequence identity thereto.

| | | SEQ |
|---|---|---|
| | | ID |
| Description | Sequence | NO: |
| Cas9 nickase | MDKKYSIGLDIGTNSVGWAVITDEYKVPSKKFKVLGNTDRHSIKKNLIGALLFDSGETA | 37 |
| Streptococcus | EATRLKRTARRRYTRRKNRICYLQEIFSNEMAKVDDSFFHRLEESFLVEEDKKHERHPI | |
| pyogenes | FGNIVDEVAYHEKYPTIYHLRKKLVDSTDKADLRLIYLALAHMIKFRGHFLIEGDLNPD | |
| Q992W2 Cas9 | NSDVDKLFIQLVQTYNQLFEENPINASGVDAKAILSARLSKSRRLENLIAQLPGEKKNG | |
| with H840 [symbol] , | LFGNLIALSLGLTPNFKSNFDLAEDAKLQLSKDTYDDDLDNLLAQIGDQYADLFLAAKN | |
| wherein X is | LSDAILLSDILRVNTEITKAPLSASMIKRYDEHHQDLTLLKALVRQQLPEKYKEIFFDQ | |
| any | SKNGYAGYIDGGASQEEFYKFIKPILEKMDGTEELLVKLNREDLLRKQRTFDNGSIPHQ | |
| alternate | IHLGELHAILRRQEDFYPFLKDNREKIEKILTFRIPYYVGPLARGNSRFAWMTRKSEET | |
| amino acid | ITPWNFEEVVDKGASAQSFIERMTNFDKNLPNEKVLPKHSLLYEYFTVYNELTKVKYVT | |
| | EGMRKPAFLSGEQKKAIVDLLFKTNRKVTVKQLKEDYFKKIECFDSVEISGVEDRFNAS | |
| | LGTYHDLLKIIKDKDFLDNEENEDILEDIVLTLTLFEDREMIEERLKTYAHLFDDKVMK | |
| | QLKRRRYTGWGRLSRKLINGIRDKQSGKTILDFLKSDGFANRNFMQLIHDDSLTFKEDI | |
| | QKAQVSGQGDSLHEHIANLAGSPAIKKGILQTVKVVDELVKVMGRHKPENIVIEMAREN | |
| | QTTQKGQKNSRERMKRIEEGIKELGSQILKEHPVENTQLQNEKLYLYYLQNGRDMYVDQ | |
| | ELDINRLSDYDVD [symbol] IVPQSFLKDDSIDNKVLTRSDKNRGKSDNVPSEEVVKKMKNYWRQ | |
| | LLNAKLITQRKFDNLTKAERGGLSELDKAGFIKRQLVETRQITKHVAQILDSRMNTKYD | |
| | ENDKLIREVKVITLKSKLVSDFRKDFQFYKVREINNYHHAHDAYLNAVVGTALIKKYPK | |
| | LESEFVYGDYKVYDVRKMIAKSEQEIGKATAKYFFYSNIMNFFKTEITLANGEIRKRPL | |
| | IETNGETGEIVWDKGRDFATVRKVLSMPQVNIVKKTEVQTGGFSKESILPKRNSDKLIA | |
| | RKKDWDPKKYGGFDSPTVAYSVLVVAKVEKGKSKKLKSVKELLGITIMERSSFEKNPID | |
| | FLEAKGYKEVKKDLIIKLPKYSLFELENGRKRMLASAGELQKGNELALPSKYVNFLYLA | |
| | SHYEKLKGSPEDNEQKQLFVEQHKHYLDEIIEQISEFSKRVILADANLDKVLSAYNKHR | |
| | DKPIREQAENIIHLFTLTNLGAPAAFKYFDTTIDRKRYTSTKEVLDATLIHQSITGLYE | |
| | TRIDLSQLGGD | |
| Cas9 nickase | MDKKYSIGLDIGTNSVGWAVITDEYKVPSKKFKVLGNTDRHSIKKNLIGALLFDSGETA | 38 |
| Streptococcus | EATRLKRTARRRYTRRKNRICYLQEIFSNEMAKVDDSFFHRLEESFLVEEDKKHERHPI | |
| pyogenes | FGNIVDEVAYHEKYPTIYHLRKKLVDSTDKADLRLIYLALAHMIKFRGHFLIEGDLNPD | |
| Q99ZW2 Cas9 | NSDVDKLFIQLVQTYNQLFEENPINASGVDAKAILSARLSKSRRLENLIAQLPGEKKNG | |
| with H840 [symbol] , | LFGNLIALSLGLTPNFKSNFDLAEDAKLQLSKDTYDDDLDNLLAQIGDQYADLFLAAKN | |
| wherein X is | LSDAILLSDILRVNTEITKAPLSASMIKRYDEHHQDLTLLKALVRQQLPEKYKEIFFDQ | |
| any | SKNGYAGYIDGGASQEEFYKFIKPILEKMDGTEELLVKLNREDLLRKQRTFDNGSIPHQ | |
| alternate | IHLGELHAILRRQEDFYPFLKDNREKIEKILTFRIPYYVGPLARGNSRFAWMTRKSEET | |
| amino acid | ITPWNFEEVVDKGASAQSFIERMTNFDKNLPNEKVLPKHSLLYEYFTVYNELTKVKYVT | |
| | EGMRKPAFLSGEQKKAIVDLLFKTNRKVTVKQLKEDYFKKIECFDSVEISGVEDRFNAS | |
| | LGTYHDLLKIIKDKDFLDNEENEDILEDIVLTLTLFEDREMIEERLKTYAHLFDDKVMK | |
| | QLKRRRYTGWGRLSRKLINGIRDKQSGKTILDFLKSDGFANRNFMQLIHDDSLTFKEDI | |
| | QKAQVSGQGDSLHEHIANLAGSPAIKKGILQTVKVVDELVKVMGRHKPENIVIEMAREN | |
| | QTTQKGQKNSRERMKRIEEGIKELGSQILKEHPVENTQLQNEKLYLYYLQNGRDMYVDQ | |
| | ELDINRLSDYDVD [symbol] IVPQSFLKDDSIDNKVLTRSDKNRGKSDNVPSEEVVKKMKNYWRQ | |
| | LLNAKLITQRKFDWLTKAERGGLSELDKAGFIKRQLVETRQITKHVAQILDSRMNTKYD | |
| | ENDKLIREVKVITLKSKLVSDFRKDFQFYKVREINNYHHAHDAYLNAVVGTALIKKYPK | |
| | LESEFVYGDYKVYDVRKMIAKSEQEIGKATAKYFFYSNIMNFFKTEITLANGEIRKRPL | |
| | IETNGETGEIVWDKGRDFATVRKVLSMPQVNIVKKTEVQTGGFSKESILPKRNSDKLIA | |
| | RKKDWDPKKYGGFDSPTVAYSVLVVAKVEKGKSKKLKSVKELLGITIMERSSFEKNPID | |
| | FLEAKGYKEVKKDLIIKLPKYSLFELENGRKRMLASAGELQKGNELALPSKYVNFLYLA | |
| | SHYEKLKGSPEDNEQKQLFVEQHKHYLDEIIEQISEFSKRVILADANLDKVLSAYNKHR | |
| | DKPIREQAENIIHLFTLTNLGAPAAFKYFDTTIDRKRYTSTKEVLDATLIHQSITGLYE | |
| | TRIDLSQLGGD | |
| Cas9 nickase | MDKKYSIGLDIGTNSVGWAVITDEYKVPSKKFKVLGNTDRHSIKKNLIGALLFDSGETA | 39 |
| Streptococcus | EATRLKRTARRRYTRRKNRICYLQEIFSNEMAKVDDSFFHRLEESFLVEEDKKHERHPI | |
| pyogenes | FGNIVDEVAYHEKYPTIYHLRKKLVDSTDKADLRLIYLALAHMIKFRGHFLIEGDLNPD | |
| Q99ZW2 Cas9 | NSDVDKLFIQLVQTYNQLFEENPINASGVDAKAILSARLSKSRRLENLIAQLPGEKKNG | |
| with R863X, | LFGNLIALSLGLTPNFKSNFDLAEDAKLQLSKDTYDDDLDNLLAQIGDQYADLFLAAKN | |
| wherein X is | LSDAILLSDILRVNTEITKAPLSASMIKRYDEHHQDLTLLKALVRQQLPEKYKEIFFDQ | |
| any | SKNGYAGYIDGGASQEEFYKFIKPILEKMDGTEELLVKLNREDLLRKQRTFDNGSIPHQ | |
| alternate | IHLGELHAILRRQEDFYPFLKDNREKIEKILTFRIPYYVGPLARGNSRFAWMTRKSEET | |
| amino acid | ITPWNFEEVVDKGASAQSFIERMTNFDKNLPNEKVLPKHSLLYEYFTVYNELTKVKYVT | |
| | EGMRKPAFLSGEQKKAIVDLLFKTNRKVTVKQLKEDYFKKIECFDSVEISGVEDRFNAS | |
| | LGTYHDLLKIIKDKDFLDNEENEDILEDIVLTLTLFEDREMIEERLKTYAHLFDDKVMK | |
| | QLKRRRYTGWGRLSRKLINGIRDKQSGKTILDFLKSDGFANRNFMQLIHDDSLTFKEDI | |
| | QKAQVSGQGDSLHEHIANLAGSPAIKKGILQTVKVVDELVKVMGRHKPENIVIEMAREN | |
| | QTTQKGQKNSRERMKRIEEGIKELGSQILKEHPVENTQLQNEKLYLYYLQNGRDMYVDQ | |
| | ELDINRLSDYDVDHIVPQSFLKDDSIDNKVLTRSDKN [symbol] GKSDNVPSEEVVKKMKNYWRQ | |
| | LLNAKLITQRKFDNLTKAERGGLSELDKAGFIKRQLVETRQITKHVAQILDSRMNTKYD | |
| | ENDKLIREVKVITLKSKLVSDFRKDFQFYKVREINNYHHAHDAYLNAVVGTALIKKYPK | |
| | LESEFVYGDYKVYDVRKMIAKSEQEIGKATAKYFFYSNIMNFFKTEITLANGEIRKRPL | |
| | IETNGETGEIVWDKGRDFATVRKVLSMPQVNIVKKTEVQTGGFSKESILPKRNSDKLIA | |
| | RKKDWDPKKYGGFDSPTVAYSVLVVAKVEKGKSKKLKSVKELLGITIMERSSFEKNPID | |
| | FLEAKGYKEVKKDLIIKLPKYSLFELENGRKRMLASAGELQKGNELALPSKYVNFLYLA | |
| | SHYEKLKGSPEDNEQKQLFVEQHKHYLDEIIEQISEFSKRVILADANLDKVLSAYNKHR | |
| | DKPIREQAENIIHLFTLTNLGAPAAFKYFDTTIDRKRYTSTKEVLDATLIHQSITGLYE | |
| | TRIDLSQLGGD | |
| Cas9 nickase | MDKKYSIGLDIGTNSVGWAVITDEYKVPSKKFKVLGNTDRHSIKKNLIGALLFDSGETA | 40 |
| Streptococcus | EATRLKRTARRRYTRRKNRICYLQEIFSNEMAKVDDSFFHRLEESFLVEEDKKHERHPI | |
| pyogenes | FGNIVDEVAYHEKYPTIYHLRKKLVDSTDKADLRLIYLALAHMIKFRGHFLIEGDLNPD | |
| Q99ZW2 Cas9 | NSDVDKLFIQLVQTYNQLFEENPINASGVDAKAILSARLSKSRRLENLIAQLPGEKKNG | |
| with R863 [symbol] , | LFGNLIALSLGLTPNFKSNFDLAEDAKLQLSKDTYDDDLDNLLAQIGDQYADLFLAAKN | |
| wherein X is | LSDAILLSDILRVNTEITKAPLSASMIKRYDEHHQDLTLLKALVRQQLPEKYKEIFFDQ | |
| any | SKNGYAGYIDGGASQEEFYKFIKPILEKMDGTEELLVKLNREDLLRKQRTFDNGSIPHQ | |
| alternate | IHLGELHAILRRQEDFYPFLKDNREKIEKILTFRIPYYVGPLARGNSRFAWMTRKSEET | |
| amino acid | ITPWNFEEVVDKGASAQSFIERMTNFDKNLPNEKVLPKHSLLYEYFTVYNELTKVKYVT | |
| | EGMRKPAFLSGEQKKAIVDLLFKTNRKVTVKQLKEDYFKKIECFDSVEISGVEDRFNAS | |
| | LGTYHDLLKIIKDKDFLDNEENEDILEDIVLTLTLFEDREMIEERLKTYAHLFDDKVMK | |
| | QLKRRRYTGWGRLSRKLINGIRDKQSGKTILDFLKSDGFANRNFMQLIHDDSLTFKEDI | |
| | QKAQVSGQGDSLHEHIANLAGSPAIKKGILQTVKVVDELVKVMGRHKPENIVIEMAREN | |
| | QTTQKGQKNSRERMKRIEEGIKELGSQILKEHPVENTQLQNEKLYLYYLQNGRDMYVDQ | |
| | ELDINRLSDYDVDHIVPQSFLKDDSIDNKVLTRSDKN [symbol] GKSDNVPSEEVVKKMKNYWRQ | |
| | LLNAKLITQRKFDNLTKAERGGLSELDKAGFIKRQLVETRQITKHVAQILDSRMNTKYD | |
| | ENDKLIREVKVITLKSKLVSDFRKDFQFYKVREINNYHHAHDAYLNAVVGTALIKKYPK | |
| | LESEFVYGDYKVYDVRKMIAKSEQEIGKATAKYFFYSNIMNFFKTEITLANGEIRKRPL | |
| | IETNGETGEIVWDKGRDFATVRKVLSMPQVNIVKKTEVQTGGFSKESILPKRNSDKLIA | |
| | RKKDWDPKKYGGFDSPTVAYSVLVVAKVEKGKSKKLKSVKELLGITIMERSSFEKNPID | |
| | FLEAKGYKEVKKDLIIKLPKYSLFELENGRKRMLASAGELQKGNELALPSKYVNFLYLA | |
| | SHYEKLKGSPEDNEQKQLFVEQHKHYLDEIIEQISEFSKRVILADANLDKVLSAYNKHR | |
| | DKPIREQAENIIHLFTLTNLGAPAAFKYFDTTIDRKRYTSTKEVLDATLIHQSITGLYE | |
| | TRIDLSQLGGD | |

[0420] In some embodiments, the N-terminal methionine is removed from a Cas9 nickase, or from any Cas9 variant, ortholog, or equivalent disclosed or contemplated herein. For example, methionine-minus Cas9 nickases include the following sequences, or a variant thereof having an amino acid sequence that has at least 80%, at least 85%, at least 90%, at least 95%, or at least 99% sequence identity thereto.

| Description | Sequence |
|---|---|
| Cas9 nickase | DKKYSIGLDIGTNSVGWAVITDEYKVPSKKFKVLGNTDRHSIKKNLIGALLFDSGETAEATRLKRTARRR |
| (Met minus) | YTRRKNRICYLQEIFSNEMAKVDDSFFHRLEESFLVEEDKKHERHPIFGNIVDEVAYHEKYPTIYHLRKK |
| Streptococcus | LVDSTDKADLRLIYLALAHMIKFRGHFLIEGDLNPDNSDVDKLFIQLVQTYNQLFEENPINASGVDAKAI |
| pyogenes | LSARLSKSRRLENLIAQLPGEKKNGLFGNLIALSLGLTPNFKSNFDLAEDAKLQLSKDTYDDDLDNLLAQ |
| Q992W2 Cas9 | IGDQYADLFLAAKNLSDAILLSDILRVNTEITKAPLSASMIKRYDEHHQDLTLLKALVRQQLPEKYKEIE |
| with H840 [symbol] , | FDQSKNGYAGYIDGGASQEEFYKFIKPILEKMDGTEELLVKLNREDLLRKQRTFDNGSIPHQIHLGELHA |
| wherein X is | ILRRQEDFYPFLKDNREKIEKILTFRIPYYVGPLARGNSRFAWMTRKSEETITPWNFEEVVDKGASAQSF |
| any | IERMTNFDKNLPNEKVLPKHSLLYEYFTVYNELTKVKYVTEGMRKPAFLSGEQKKAIVDLLFKTNRKVTV |
| alternate | KQLKEDYFKKIECFDSVEISGVEDRFNASLGTYHDLLKIIKDKDFLDNEENEDILEDIVLTLTLFEDREM |
| amino acid | IEERLKTYAHLFDDKVMKQLKRRRYTGWGRLSRKLINGIRDKQSGKTILDFLKSDGFANRNFMQLIHDDS |
| | LTFKEDIQKAQVSGQGDSLHEHIANLAGSPAIKKGILQTVKVVDELVKVMGRHKPENIVIEMARENQTTQ |
| | KGQKNSRERMKRIEEGIKELGSQILKEHPVENTQLQNEKLYLYYLQNGRDMYVDQELDINRLSDYDVD [symbol] I |
| | VPQSFLKDDSIDNKVLTRSDKNRGKSDNVPSEEVVKKMKNYWRQLLNAKLITQRKFDNLTKAERGGLSEL |
| | DKAGFIKRQLVETRQITKHVAQILDSRMNTKYDENDKLIREVKVITLKSKLVSDFRKDFQFYKVREINNY |
| | HHAHDAYLNAVVGTALIKKYPKLESEFVYGDYKVYDVRKMIAKSEQEIGKATAKYFFYSNIMNFFKTEIT |
| | LANGEIRKRPLIETNGETGEIVWDKGRDFATVRKVLSMPQVNIVKKTEVQTGGFSKESILPKRNSDKLIA |
| | RKKDWDPKKYGGFDSPTVAYSVLVVAKVEKGKSKKLKSVKELLGITIMERSSFEKNPIDFLEAKGYKEVK |
| | KDLIIKLPKYSLFELENGRKRMLASAGELQKGNELALPSKYVNFLYLASHYEKLKGSPEDNEQKQLFVEQ |
| | HKHYLDEIIEQISEFSKRVILADANLDKVLSAYNKHRDKPIREQAENIIHLFTLTNLGAPAAFKYFDTTI |
| | DRKRYTSTKEVLDATLIHQSITGLYETRIDLSQLGGD (SEQ ID NO: 41) |
| Cas9 nickase | DKKYSIGLDIGTNSVGWAVITDEYKVPSKKFKVLGNTDRHSIKKNLIGALLFDSGETAEATRLKRTARRR |
| (Met minus) | YTRRKNRICYLQEIFSNEMAKVDDSFFHRLEESFLVEEDKKHERHPIFGNIVDEVAYHEKYPTIYHLRKK |
| Streptococcus | LVDSTDKADLRLIYLALAHMIKFRGHFLIEGDLNPDNSDVDKLFIQLVQTYNQLFEENPINASGVDAKAI |
| pyogenes | LSARLSKSRRLENLIAQLPGEKKNGLFGNLIALSLGLTPNFKSNFDLAEDAKLQLSKDTYDDDLDNLLAQ |
| Q992W2 Cas9 | IGDQYADLFLAAKNLSDAILLSDILRVNTEITKAPLSASMIKRYDEHHQDLTLLKALVRQQLPEKYKEIF |
| with H840 [symbol] , | FDQSKNGYAGYIDGGASQEEFYKFIKPILEKMDGTEELLVKLNREDLLRKQRTFDNGSIPHQIHLGELHA |
| wherein X is | ILRRQEDFYPFLKDNREKIEKILTFRIPYYVGPLARGNSRFAWMTRKSEETITPWNFEEVVDKGASAQSE |
| | IERMTNFDKNLPNEKVLPKHSLLYEYFTVYNELTKVKYVTEGMRKPAFLSGEQKKAIVDLLFKTNRKVTV |
| any | KQLKEDYFKKIECFDSVEISGVEDRFNASLGTYHDLLKIIKDKDFLDNEENEDILEDIVLTLTLFEDREM |
| alternate | IEERLKTYAHLFDDKVMKQLKRRRYTGWGRLSRKLINGIRDKQSGKTILDFLKSDGFANRNFMQLIHDDS |
| amino acid | LTFKEDIQKAQVSGQGDSLHEHIANLAGSPAIKKGILQTVKVVDELVKVMGRHKPENIVIEMARENQTTQ |
| | KGQKNSRERMKRIEEGIKELGSQILKEHPVENTQLQNEKLYLYYLQNGRDMYVDQELDINRLSDYDVD [symbol] I |
| | VPQSFLKDDSIDNKVLTRSDKNRGKSDNVPSEEVVKKMKNYWRQLLNAKLITQRKFDNLTKAERGGLSEL |
| | DKAGFIKRQLVETRQITKHVAQTLDSRMNTKYDENDKLIREVKVITLKSKLVSDFRKDFQFYKVREINNY |
| | HHAHDAYLNAVVGTALIKKYPKLESEFVYGDYKVYDVRKMIAKSEQEIGKATAKYFFYSNIMNFFKTEIT |
| | LANGEIRKRPLIETNGETGEIVWDKGRDFATVRKVLSMPQVNIVKKTEVQTGGFSKESILPKRNSDKLIA |
| | RKKDWDPKKYGGFDSPTVAYSVLVVAKVEKGKSKKLKSVKELLGITIMERSSFEKNPIDFLEAKGYKEVK |
| | KDLIIKLPKYSLFELENGRKRMLASAGELQKGNELALPSKYVNFLYLASHYEKLKGSPEDNEQKQLFVEQ |
| | HKHYLDEIIEQISEFSKRVILADANLDKVLSAYNKHRDKPIREQAENIIHLFTLTNLGAPAAFKYFDTTI |
| | DRKRYTSTKEVLDATLIHQSITGLYETRIDLSQLGGD (SEQ ID NO: 42) |
| Cas9 nickase | DKKYSIGLDIGTNSVGWAVITDEYKVPSKKFKVLGNTDRHSIKKNLIGALLFDSGETAEATRLKRTARRR |
| (Met minus) | YTRRKNRICYLQEIFSNEMAKVDDSFFHRLEESFLVEEDKKHERHPIFGNIVDEVAYHEKYPTIYHLRKK |
| Streptococcus | LVDSTDKADLRLIYLALAHMIKFRGHFLIEGDLNPDNSDVDKLFIQLVQTYNQLFEENPINASGVDAKAI |
| pyogenes | LSARLSKSRRLENLIAQLPGEKKNGLFGNLIALSLGLTPNFKSNFDLAEDAKLQLSKDTYDDDLDNLLAQ |
| Q992W2 Cas9 | IGDQYADLFLAAKNLSDAILLSDILRVNTEITKAPLSASMIKRYDEHHQDLTLLKALVRQQLPEKYKEIF |
| with R863X, | FDQSKNGYAGYIDGGASQEEFYKFIKPILEKMDGTEELLVKLNREDLLRKQRTFDNGSIPHQIHLGELHA |
| wherein X is | ILRRQEDFYPFLKDNREKIEKILTFRIPYYVGPLARGNSRFAWMTRKSEETITPWNFEEVVDKGASAQSF |
| any | IERMTNFDKNLPNEKVLPKHSLLYEYFTVYNELTKVKYVTEGMRKPAFLSGEQKKAIVDLLFKTNRKVTV |
| alternate | KQLKEDYFKKIECFDSVEISGVEDRFNASLGTYHDLLKIIKDKDFLDNEENEDILEDIVLTLTLFEDREM |
| amino acid | IEERLKTYAHLFDDKVMKQLKRRRYTGWGRLSRKLINGIRDKQSGKTILDFLKSDGFANRNFMQLIHDDS |
| | LTFKEDIQKAQVSGQGDSLHEHIANLAGSPAIKKGILQTVKVVDELVKVMGRHKPENIVIEMARENQTTQ |
| | KGQKNSRERMKRIEEGIKELGSQILKEHPVENTQLQNEKLYLYYLQNGRDMYVDQELDINRLSDYDVDHI |
| | VPQSFLKDDSIDNKVLTRSDKN [symbol] GKSDNVPSEEVVKKMKNYWRQLLNAKLITQRKFDNLTKAERGGLSEL |
| | DKAGFIKRQLVETRQITKHVAQTLDSRMNTKYDENDKLIREVKVITLKSKLVSDFRKDFQFYKVREINNY |
| | HHAHDAYLNAVVGTALIKKYPKLESEFVYGDYKVYDVRKMIAKSEQEIGKATAKYFFYSNIMNFFKTEIT |
| | LANGEIRKRPLIETNGETGEIVWDKGRDFATVRKVLSMPQVNIVKKTEVQTGGFSKESILPKRNSDKLIA |
| | RKKDWDPKKYGGFDSPTVAYSVLVVAKVEKGKSKKLKSVKELLGITIMERSSFEKNPIDFLEAKGYKEVK |
| | KDLIIKLPKYSLFELENGRKRMLASAGELQKGNELALPSKYVNFLYLASHYEKLKGSPEDNEQKQLFVEQ |
| | HKHYLDEIIEQISEFSKRVILADANLDKVLSAYNKHRDKPIREQAENIIHLFTLTNLGAPAAFKYFDTTI |
| | DRKRYTSTKEVLDATLIHQSITGLYETRIDLSQLGGD(SEQ ID NO: 43) |
| Cas9 nickase | DKKYSIGLDIGTNSVGWAVITDEYKVPSKKFKVLGNTDRHSIKKNLIGALLFDSGETAEATRLKRTARRR |
| (Met minus) | YTRRKNRICYLQEIFSNEMAKVDDSFFHRLEESFLVEEDKKHERHPIFGNIVDEVAYHEKYPTIYHLRKK |
| Streptococcus | LVDSTDKADLRLIYLALAHMIKFRGHFLIEGDLNPDNSDVDKLFIQLVQTYNQLFEENPINASGVDAKAI |
| pyogenes | LSARLSKSRRLENLIAQLPGEKKNGLFGNLIALSLGLTPNFKSNFDLAEDAKLQLSKDTYDDDLDNLLAQ |
| Q992W2 Cas9 | IGDQYADLFLAAKNLSDAILLSDILRVNTEITKAPLSASMIKRYDEHHQDLTLLKALVRQQLPEKYKEIF |
| with R863 [symbol] , | FDQSKNGYAGYIDGGASQEEFYKFIKPILEKMDGTEELLVKLNREDLLRKQRTFDNGSIPHQIHLGELHA |
| wherein X is | ILRRQEDFYPFLKDNREKIEKILTFRIPYYVGPLARGNSRFAWMTRKSEETITPWNFEEVVDKGASAQSE |
| any | IERMTNFDKNLPNEKVLPKHSLLYEYFTVYNELTKVKYVTEGMRKPAFLSGEQKKAIVDLLFKTNRKVTV |
| alternate | KQLKEDYFKKIECFDSVEISGVEDRFNASLGTYHDLLKIIKDKDFLDNEENEDILEDIVLTLTLFEDREM |
| amino acid | IEERLKTYAHLFDDKVMKQLKRRRYTGWGRLSRKLINGIRDKQSGKTILDFLKSDGFANRNFMQLIHDDS |
| | LTFKEDIQKAQVSGQGDSLHEHIANLAGSPAIKKGILQTVKVVDELVKVMGRHKPENIVIEMARENQTTQ |
| | KGQKNSRERMKRIEEGIKELGSQILKEHPVENTQLQNEKLYLYYLQNGRDMYVDQELDINRLSDYDVDHI |
| | VPQSFLKDDSIDNKVLTRSDKN [symbol] GKSDNVPSEEVVKKMKNYWRQLLNAKLITQRKFDNLTKAERGGLSEL |
| | DKAGFIKRQLVETRQITKHVAQTLDSRMNTKYDENDKLIREVKVITLKSKLVSDFRKDFQFYKVREINNY |
| | HHAHDAYLNAVVGTALIKKYPKLESEFVYGDYKVYDVRKMIAKSEQEIGKATAKYFFYSNIMNFFKTEIT |
| | LANGEIRKRPLIETNGETGEIVWDKGRDFATVRKVLSMPQVNIVKKTEVQTGGFSKESILPKRNSDKLIA |
| | RKKDWDPKKYGGFDSPTVAYSVLVVAKVEKGKSKKLKSVKELLGITIMERSSFEKNPIDFLEAKGYKEVK |
| | KDLIIKLPKYSLFELENGRKRMLASAGELQKGNELALPSKYVNFLYLASHYEKLKGSPEDNEQKQLFVEQ |
| | HKHYLDEIIEQISEFSKRVILADANLDKVLSAYNKHRDKPIREQAENIIHLFTLTNLGAPAAFKYFDTTI |
| | DRKRYTSTKEVLDATLIHQSITGLYETRIDLSQLGGD (SEQ ID NO: 44) |

[0421] (5) Other Cas9 Variants

[0422] Besides dead Cas9 and Cas9 nickase variants, the Cas9 proteins used herein may also include other “Cas9 variants” having at least about 70% identical, at least about 80% identical, at least about 90% identical, at least about 95% identical, at least about 96% identical, at least about 97% identical, at least about 98% identical, at least about 99% identical, at least about 99.5% identical, or at least about 99.9% identical to any reference Cas9 protein, including any wild type Cas9, or mutant Cas9 (e.g., a dead Cas9 or Cas9 nickase), or fragment Cas9, or circular permutant Cas9, or other variant of Cas9 disclosed herein or known in the art. In some embodiments, a Cas9 variant may have 1, 2, 3, 4, 5, 6, 7, 8, 9, 10, 11, 12, 13, 14, 15, 16, 17, 18, 19, 20, 21, 22, 21, 24, 25, 26, 27, 28, 29, 30, 31, 32, 33, 34, 35, 36, 37, 38, 39, 40, 41, 42, 43, 44, 45, 46, 47, 48, 49, 50 or more amino acid changes compared to a reference Cas9. In some embodiments, the Cas9 variant comprises a fragment of a reference Cas9 (e.g., a gRNA binding domain or a DNA-cleavage domain), such that the fragment is at least about 70% identical, at least about 80% identical, at least about 90% identical, at least about 95% identical, at least about 96% identical, at least about 97% identical, at least about 98% identical, at least about 99% identical, at least about 99.5% identical, or at least about 99.9% identical to the corresponding fragment of wild type Cas9. In some embodiments, the fragment is at least 30%, at least 35%, at least 40%, at least 45%, at least 50%, at least 55%, at least 60%, at least 65%, at least 70%, at least 75%, at least 80%, at least 85%, at least 90%, at least 95% identical, at least 96%, at least 97%, at least 98%, at least 99%, or at least 99.5% of the amino acid length of a corresponding wild type Cas9 (e.g., SEQ ID NO: 5).

[0423] In some embodiments, the disclosure also may utilize Cas9 fragments which retain their functionality and which are fragments of any herein disclosed Cas9 protein. In some embodiments, the Cas9 fragment is at least 100 amino acids in length. In some embodiments, the fragment is at least 100, 150, 200, 250, 300, 350, 400, 450, 500, 550, 600, 650, 700, 750, 800, 850, 900, 950, 1000, 1050, 1100, 1150, 1200, 1250, or at least 1300 amino acids in length.

[0424] In various embodiments, the base editors disclosed herein may comprise one of the Cas9 variants described as follows, or a Cas9 variant thereof having at least about 70% identical, at least about 80% identical, at least about 90% identical, at least about 95% identical, at least about 96% identical, at least about 97% identical, at least about 98% identical, at least about 99% identical, at least about 99.5% identical, or at least about 99.9% identical to any reference Cas9 variants.

[0425] (6) Small-Sized Cas9 Variants

[0426] In some embodiments, the base editors contemplated herein can include a Cas9 protein that is of smaller molecular weight than the canonical SpCas9 sequence. In some embodiments, the smaller-sized Cas9 variants may facilitate delivery to cells, e.g., by an expression vector, nanoparticle, or other means of delivery.

[0427] The canonical SpCas9 protein is 1368 amino acids in length and has a predicted molecular weight of 158 kilodaltons. The term “small-sized Cas9 variant”, as used herein, refers to any Cas9 variant-naturally occurring, engineered, or otherwise—that is less than at least 1300 amino acids, or at least less than 1290 amino acids, or than less than 1280 amino acids, or less than 1270 amino acid, or less than 1260 amino acid, or less than 1250 amino acids, or less than 1240 amino acids, or less than 1230 amino acids, or less than 1220 amino acids, or less than 1210 amino acids, or less than 1200 amino acids, or less than 1190 amino acids, or less than 1180 amino acids, or less than 1170 amino acids, or less than 1160 amino acids, or less than 1150 amino acids, or less than 1140 amino acids, or less than 1130 amino acids, or less than 1120 amino acids, or less than 1110 amino acids, or less than 1100 amino acids, or less than 1050 amino acids, or less than 1000 amino acids, or less than 950 amino acids, or less than 900 amino acids, or less than 850 amino acids, or less than 800 amino acids, or less than 750 amino acids, or less than 700 amino acids, or less than 650 amino acids, or less than 600 amino acids, or less than 550 amino acids, or less than 500 amino acids, but at least larger than about 400 amino acids and retaining the required functions of the Cas9 protein.

[0428] In various embodiments, the base editors disclosed herein may comprise one of the small-sized Cas9 variants described as follows, or a Cas9 variant thereof having at least about 70% identical, at least about 80% identical, at least about 90% identical, at least about 95% identical, at least about 96% identical, at least about 97% identical, at least about 98% identical, at least about 99% identical, at least about 99.5% identical, or at least about 99.9% identical to any reference small-sized Cas9 protein.

| | | SEQ |
|---|---|---|
| | | ID |
| Description | Sequence | NO: |
| SaCas 9 | MGKRNYILGLDIGITSVGYGIIDYETRDVIDAGVRLFKEANVENNEGRRSKRGARRLKRR | 45 |
| Staphylococcus | RRHRIQRVKKLLFDYNLLTDHSELSGINPYEARVKGLSQKLSEEEFSAALLHLAKRRGVH | |
| aureus | NVNEVEEDTGNELSTKEQISRNSKALEEKYVAELQLERLKKDGEVRGSINRFKTSDYVKE | |
| 1053 AA | AKQLLKVQKAYHQLDQSFIDTYIDLLETRRTYYEGPGEGSPFGWKDIKEWYEMLMGHCTY | |
| 123 kDa | FPEELRSVKYAYNADLYNALNDLNNLVITRDENEKLEYYEKFQIIENVFKQKKKPTLKQI | |
| | AKEILVNEEDIKGYRVTSTGKPEFTNLKVYHDIKDITARKEIIENAELLDQIAKILTIYQ | |
| | SSEDIQEELTNLNSELTQEEIEQISNLKGYTGTHNLSLKAINLILDELWHTNDNQIAIFN | |
| | RLKLVPKKVDLSQQKEIPTTLVDDFILSPVVKRSFIQSIKVINAIIKKYGLPNDIIIELA | |
| | REKNSKDAQKMINEMQKRNRQTNERIEEIIRTTGKENAKYLIEKIKLHDMQEGKCLYSLE | |
| | AIPLEDLLNNPFNYEVDHIIPRSVSFDNSFNNKVLVKQEENSKKGNRTPFQYLSSSDSKI | |
| | SYETFKKHILNLAKGKGRISKTKKEYLLEERDINRFSVQKDFINRNLVDTRYATRGLMNL | |
| | LRSYFRVNNLDVKVKSINGGFTSFLRRKWKFKKERNKGYKHHAEDALIIANADFIFKEWK | |
| | KLDKAKKVMENQMFEEKQAESMPEIETEQEYKEIFITPHQIKHIKDFKDYKYSHRVDKKP | |
| | NRKLINDTLYSTRKDDKGNTLIVNNLNGLYDKDNDKLKKLINKSPEKLLMYHHDPQTYQK | |
| | LKLIMEQYGDEKNPLYKYYEETGNYLTKYSKKDNGPVIKKIKYYGNKLNAHLDITDDYPN | |
| | SRNKVVKLSLKPYRFDVYLDNGVYKFVTVKNLDVIKKENYYEVNSKCYEEAKKLKKISNQ | |
| | AEFIASFYKNDLIKINGELYRVIGVNNDLLNRIEVNMIDITYREYLENMNDKRPPHIIKT | |
| | IASKTQSIKKYSTDILGNLYEVKSKKHPQIIKK | |
| NmeCas 9 | MAAFKPNSINYILGLDIGIASVGWAMVEIDEEENPIRLIDLGVRVFERAEVPKTGDSLAM | 4b |
| N. | ARRLARSVRRLTRRRAHRLLRTRRLLKREGVLQAANFDENGLIKSLPNTPWQLRAAALDR | |
| meningitidis | KLTPLEWSAVLLHLIKHRGYLSQRKNEGETADKELGALLKGVAGNAHALQTGDFRTPAEL | |
| 1083 AA | ALNKFEKESGHIRNQRSDYSHTFSRKDLQAELILLFEKQKEFGNPHVSGGLKEGIETLLM | |
| 124.5 kDa | TQRPALSGDAVQKMLGHCTFEPAEPKAAKNTYTAERFIWLTKLNNLRILEQGSERPLTDT | |
| | ERATLMDEPYRKSKLTYAQARKLLGLEDTAFFKGLRYGKDNAEASTLMEMKAYHAISRAL | |
| | EKEGLKDKKSPLNLSPELQDEIGTAFSLFKTDEDITGRLKDRIQPEILEALLKHISFDKF | |
| | VOISLKALRRIVPLMEQGKRYDEACAEIYGDHYGKKNTEEKIYLPPIPADEIRNPVVLRA | |
| | LSQARKVINGVVRRYGSPARIHIETAREVGKSFKDRKEIEKRQEENRKDREKAAAKFREY | |
| | FPNFVGEPKSKDILKLRLYEQQHGKCLYSGKEINLGRLNEKGYVEIDAALPFSRTWDDSF | |
| | NNKVLVLGSENQNKGNQTPYEYFNGKDNSREWQEFKARVETSRFPRSKKQRILLQKFDED | |
| | GFKERNLNDTRYVNRFLCQFVADRMRLTGKGKKRVFASNGQITNLLRGFWGLRKVRAEND | |
| | RHHALDAVVVACSTVAMQQKITRFVRYKEMNAFDGKTIDKETGEVLHQKTHFPQPWEFFA | |
| | QEVMIRVFGKPDGKPEFEEADTLEKLRTLLAEKLSSRPEAVHEYVTPLFVSRAPNRKMSG | |
| | QGHMETVKSAKRLDEGVSVLRVPLTQLKLKDLEKMVNREREPKLYEALKARLEAHKDDPA | |
| | KAFAEPFYKYDKAGNRTQQVKAVRVEQVQKTGVWVRNHNGIADNATMVRVDVFEKGDKYY | |
| | LVPIYSWQVAKGILPDRAVVQGKDEEDWQLIDDSFNFKFSLHPNDLVEVITKKARMFGYF | |
| | ASCHRGTGNINIRIHDLDHKIGKNGILEGIGVKTALSFQKYQIDELGKEIRPCRLKKRPP | |
| | VR | |
| Cj Cas 9 | MARILAFDIGISSIGWAFSENDELKDCGVRIFTKVENPKTGESLALPRRLARSARKRLAR | 47 |
| C. jejuni | RKARLNHLKHLIANEFKLNYEDYQSFDESLAKAYKGSLISPYELRFRALNELLSKQDFAR | |
| 984 AA | VILHIAKRRGYDDIKNSDDKEKGAILKAIKQNEEKLANYQSVGEYLYKEYFQKFKENSKE | |
| 114.9 kDa | FTNVRNKKESYERCIAQSFLKDELKLIFKKQREFGFSFSKKFEEEVLSVAFYKRALKDFS | |
| | HLVGNCSFFTDEKRAPKNSPLAFMFVALTRIINLLNNLKNTEGILYTKDDLNALLNEVLK | |
| | NGTLTYKQTKKLLGLSDDYEFKGEKGTYFIEFKKYKEFIKALGEHNLSQDDLNEIAKDIT | |
| | LIKDEIKLKKALAKYDLNQNQIDSLSKLEFKDHLNISFKALKLVTPLMLEGKKYDEACNE | |
| | LNLKVAINEDKKDFLPAFNETYYKDEVTNPVVLRAIKEYRKVLNALLKKYGKVHKINIEL | |
| | AREVGKNHSQRAKIEKEQNENYKAKKDAELECEKLGLKINSKNILKLRLFKEQKEFCAYS | |
| | GEKIKISDLQDEKMLEIDHIYPYSRSFDDSYMNKVLVFTKQNQEKLNQTPFEAFGNDSAK | |
| | WQKIEVLAKNLPTKKQKRILDKNYKDKEQKNFKDRNLNDTRYIARLVLNYTKDYLDFLPL | |
| | SDDENTKLNDTQKGSKVHVEAKSGMLTSALRHTWGFSAKDRNNHLHHAIDAVIIAYANNS | |
| | IVKAFSDFKKEQESNSAELYAKKISELDYKNKRKFFEPFSGFRQKVLDKIDEIFVSKPER | |
| | KKPSGALHEETFRKEEEFYQSYGGKEGVLKALELGKIRKVNGKIVKNGDMFRVDIFKHKK | |
| | TNKFYAVPIYTMDFALKVLPNKAVARSKKGEIKDWILMDENYEFCFSLYKDSLILIQTKD | |
| | MQEPEFVYYNAFTSSTVSLIVSKHDNKFETLSKNQKILFKNANEKEVIAKSIGIQNLKVF | |
| | EKYIVSALGEVTKAEFRQREDFKK | |
| GeoCas 9 | MRYKIGLDIGITSVGWAVMNLDIPRIEDLGVRIFDRAENPQTGESLALPRRLARSARRRL | 48 |
| G. | RRRKHRLERIRRLVIREGILTKEELDKLFEEKHEIDVWQLRVEALDRKLNNDELARVLLH | |
| stearothermophilus | LAKRRGFKSNRKSERSNKENSTMLKHIEENRAILSSYRTVGEMIVKDPKFALHKRNKGEN | |
| 1087 AA | YTNTIARDDLEREIRLIFSKQREFGNMSCTEEFENEYITIWASQRPVASKDDIEKKVGFC | |
| 127 kDa | TFEPKEKRAPKATYTFQSFIAWEHINKLRLISPSGARGLTDEERRLLYEQAFQKNKITYH | |
| | DIRTLLHLPDDTYFKGIVYDRGESRKQNENIRFLELDAYHQIRKAVDKVYGKGKSSSFLP | |
| | IDFDTFGYALTLFKDDADIHSYLRNEYEQNGKRMPNLANKVYDNELIEELLNLSFTKFGH | |
| | LSLKALRSILPYMEQGEVYSSACERAGYTFTGPKKKQKTMLLPNIPPIANPVVMRALTQA | |
| | RKVVNAIIKKYGSPVSIHIELARDLSQTFDERRKTKKEQDENRKKNETAIRQLMEYGLTL | |
| | NPTGHDIVKFKLWSEQNGRCAYSLQPIEIERLLEPGYVEVDHVIPYSRSLDDSYTNKVLV | |
| | LTRENREKGNRIPAEYLGVGTERWQQFETFVLTNKQFSKKKRDRLLRLHYDENEETEFKN | |
| | RNLNDTRYISRFFANFIREHLKFAESDDKQKVYTVNGRVTAHLRSRWEFNKNREESDLHH | |
| | AVDAVIVACTTPSDIAKVTAFYQRREQNKELAKKTEPHFPQPWPHFADELRARLSKHPKE | |
| | SIKALNLGNYDDQKLESLQPVFVSRMPKRSVTGAAHQETLRRYVGIDERSGKIQTVVKTK | |
| | LSEIKLDASGHFPMYGKESDPRTYEAIRQRLLEHNNDPKKAFQEPLYKPKKNGEPGPVIR | |
| | TVKIIDTKNQVIPLNDGKTVAYNSNIVRVDVFEKDGKYYCVPVYTMDIMKGILPNKAIEP | |
| | NKPYSEWKEMTEDYTFRFSLYPNDLIRIELPREKTVKTAAGEEINVKDVFVYYKTIDSAN | |
| | GGLELISHDHRFSLRGVGSRTLKRFEKYQVDVLGNIYKVRGEKRVGLASSAHSKPGKTIR | |
| | PLQSTRD | |
| LbaCasl2a | MSKLEKFTNCYSLSKTLRFKAIPVGKTQENIDNKRLLVEDEKRAEDYKGVKKLLDRYYLS | 49 |
| L. bacterium | FINDVLHSIKLKNLNNYISLFRKKTRTEKENKELENLEINLRKEIAKAFKGNEGYKSLFK | |
| 1228 AA | KDIIETILPEFLDDKDEIALVNSFNGFTTAFTGFFDNRENMFSEEAKSTSIAFRCINENL | |
| 143.9 kDa | TRYISNMDIFEKVDAIFDKHEVQEIKEKILNSDYDVEDFFEGEFFNFVLTQEGIDVYNAI | |
| | IGGFVTESGEKIKGLNEYINLYNQKTKQKLPKFKPLYKQVLSDRESLSFYGEGYTSDEEV | |
| | LEVFRNTLNKNSEIFSSIKKLEKLFKNFDEYSSAGIFVKNGPAISTISKDIFGEWNVIRD | |
| | KWNAEYDDIHLKKKAVVTEKYEDDRRKSFKKIGSFSLEQLQEYADADLSVVEKLKEIIIO | |
| | KVDEIYKVYGSSEKLFDADFVLEKSLKKNDAVVAIMKDLLDSVKSFENYIKAFFGEGKET | |
| | NRDESFYGDFVLAYDILLKVDHIYDAIRNYVTQKPYSKDKFKLYFQNPQFMGGWDKDKET | |
| | DYRATILRYGSKYYLAIMDKKYAKCLQKIDKDDVNGNYEKINYKLLPGPNKMLPKVFFSK | |
| | KWMAYYNPSEDIQKIYKNGTFKKGDMFNLNDCHKLIDFFKDSISRYPKWSNAYDFNFSET | |
| | EKYKDIAGFYREVEEQGYKVSFESASKKEVDKLVEEGKLYMFQIYNKDFSDKSHGTPNLH | |
| | TMYFKLLFDENNHGQIRLSGGAELFMRRASLKKEELVVHPANSPIANKNPDNPKKTTTLS | |
| | YDVYKDKRFSEDQYELHIPIAINKCPKNIFKINTEVRVLLKHDDNPYVIGIDRGERNLLY | |
| | IVVVDGKGNIVEQYSLNEIINNFNGIRIKTDYHSLLDKKEKERFEARQNWTSIENIKELK | |
| | AGYISQVVHKICELVEKYDAVIALEDLNSGFKNSRVKVEKQVYQKFEKMLIDKLNYMVDK | |
| | KSNPCATGGALKGYQITNKFESFKSMSTQNGFIFYIPAWLTSKIDPSTGFVNLLKTKYTS | |
| | LADSKKFISSFDRIMYVPEEDLFEFALDYKNFSRTDADYIKKWKLYSYGNRIRIFRNPKK | |
| | NNVFDWEEVCLTSAYKELFNKYGINYQQGDIRALLCEQSDKAFYSSFMALMSLMLQMRNS | |
| | ITGRTDVDFLISPVKNSDGIFYDSRNYEAQENAILPKNADANGAYNIARKVLWAIGQFKK | |
| | AEDEKLDKVKIAISNKEWLEYAOTSVKH | |
| BhCas12b | MATRSFILKIEPNEEVKKGLWKTHEVLNHGIAYYMNILKLIRQEAIYEHHEQDPKNPKKV | 50 |
| B. hisashii | SKAEIQAELWDFVLKMQKCNSFTHEVDKDEVFNILRELYEELVPSSVEKKGEANQLSNKF | |
| 1108 AA | LYPLVDPNSQSGKGTASSGRKPRWYNLKIAGDPSWEEEKKKWEEDKKKDPLAKILGKLAE | |
| 130.4 kDa | YGLIPLFIPYTDSNEPIVKEIKWMEKSRNQSVRRLDKDMFIQALERFLSWESWNLKVKEE | |
| | YEKVEKEYKTLEERIKEDIQALKALEQYEKERQEQLLRDTLNTNEYRLSKRGLRGWREII | |
| | QKWLKMDENEPSEKYLEVFKDYQRKHPREAGDYSVYEFLSKKENHFIWRNHPEYPYLYAT | |
| | FCEIDKKKKDAKQQATFTLADPINHPLWVRFEERSGSNLNKYRILTEQLHTEKLKKKLTV | |
| | QLDRLIYPTESGGWEEKGKVDIVLLPSRQFYNQIFLDIEEKGKHAFTYKDESIKFPLKGT | |
| | LGGARVQFDRDHLRRYPHKVESGNVGRIYFNMTVNIEPTESPVSKSLKIHRDDFPKVVNF | |
| | KPKELTEWIKDSKGKKLKSGIESLEIGLRVMSIDLGQRQAAAASIFEVVDQKPDIEGKLF | |
| | FPIKGTELYAVHRASFNIKLPGETLVKSREVLRKAREDNLKLMNQKLNFLRNVLHFQQFE | |
| | DITEREKRVTKWISRQENSDVPLVYQDELIQIRELMYKPYKDWVAFLKQLHKRLEVEIGK | |
| | EVKHWRKSLSDGRKGLYGISLKNIDEIDRTRKFLLRWSLRPTEPGEVRRLEPGQRFAIDQ | |
| | LNHLNALKEDRLKKMANTIIMHALGYCYDVRKKKWQAKNPACQIILFEDLSNYNPYEERS | |
| | RFENSKLMKWSRREIPRQVALQGEIYGLQVGEVGAQFSSRFHAKTGSPGIRCSVVTKEKL | |
| | QDNRFFKNLQREGRLTLDKIAVLKEGDLYPDKGGEKFISLSKDRKCVTTHADINAAQNLQ | |
| | KRFWTRTHGFYKVYCKAYQVDGQTVYIPESKDQKQKIIEEFGEGYFILKDGVYEWVNAGK | |
| | LKIKKGSSKQSSSELVDSDILKDSFDLASELKGEKLMLYRDPSGNVFPSDKWMAAGVFFG | |
| | KLERILISKLTNQYSISTIEDDSSKQSM | |

[0429] (7) Cas9 Equivalents

[0430] In some embodiments, the base editors described herein can include any Cas9 equivalent. As used herein, the term “Cas9 equivalent” is a broad term that encompasses any napDNAbp protein that serves the same function as Cas9 in the present base editors despite that its amino acid primary sequence and/or its three-dimensional structure may be different and/or unrelated from an evolutionary standpoint. Thus, while Cas9 equivalents include any Cas9 ortholog, homolog, mutant, or variant described or embraced herein that are evolutionarily related, the Cas9 equivalents also embrace proteins that may have evolved through convergent evolution processes to have the same or similar function as Cas9, but which do not necessarily have any similarity with regard to amino acid sequence and/or three dimensional structure. The base editors described here embrace any Cas9 equivalent that would provide the same or similar function as Cas9 despite that the Cas9 equivalent may be based on a protein that arose through convergent evolution.

[0431] For example, CasX is a Cas9 equivalent that reportedly has the same function as Cas9 but which evolved through convergent evolution. Thus, the CasX protein described in Liu et al., “CasX enzymes comprises a distinct family of RNA-guided genome editors,” Nature, 2019, Vol. 566: 218-223, is contemplated to be used with the base editors described herein. In addition, any variant or modification of CasX is conceivable and within the scope of the present disclosure.

[0432] Cas9 is a bacterial enzyme that evolved in a wide variety of species. However, the Cas9 equivalents contemplated herein may also be obtained from archaea, which constitute a domain and kingdom of single-celled prokaryotic microbes different from bacteria.

[0433] In some embodiments, Cas9 equivalents may refer to CasX or CasY, which have been described in, for example, Burstein et al., “New CRISPR-Cas systems from uncultivated microbes.” Cell Res. 2017 Feb. 21. doi: 10.1038/cr.2017.21, the entire contents of which is hereby incorporated by reference. Using genome-resolved metagenomics, a number of CRISPR-Cas systems were identified, including the first reported Cas9 in the archaeal domain of life. This divergent Cas9 protein was found in little-studied nanoarchaea as part of an active CRISPR-Cas system. In bacteria, two previously unknown systems were discovered, CRISPR-CasX and CRISPR-CasY, which are among the most compact systems yet discovered. In some embodiments, Cas9 refers to CasX, or a variant of CasX. In some embodiments, Cas9 refers to a CasY, or a variant of CasY. It should be appreciated that other RNA-guided DNA binding proteins may be used as a nucleic acid programmable DNA binding protein (napDNAbp), and are within the scope of this disclosure. Also see Liu et al., “CasX enzymes comprises a distinct family of RNA-guided genome editors,” Nature, 2019, Vol. 566: 218-223. Any of these Cas9 equivalents are contemplated.

[0434] In some embodiments, the Cas9 equivalent comprises an amino acid sequence that is at least 85%, at least 90%, at least 91%, at least 92%, at least 93%, at least 94%, at least 95%, at least 96%, at least 97%, at least 98%, at least 99%, or at least 99.5% identical to a naturally-occurring CasX or CasY protein. In some embodiments, the napDNAbp is a naturally-occurring CasX or CasY protein. In some embodiments, the napDNAbp comprises an amino acid sequence that is at least 85%, at least 90%, at least 91%, at least 92%, at least 93%, at least 94%, at least 95%, at least 96%, at least 97%, at least 98%, at least 99%, or at least 99.5% identical to a wild-type Cas moiety or any Cas moiety provided herein.

[0435] In various embodiments, the nucleic acid programmable DNA binding proteins include, without limitation, Cas9 (e.g., dCas9 and nCas9), CasX, CasY, Cpf1, C2c1, C2c2, C2C3, Argonaute, Cas12a, and Cas12b. One example of a nucleic acid programmable DNA-binding protein that has different PAM specificity than Cas9 is Clustered Regularly Interspaced Short Palindromic Repeats from Prevotella and Francisella 1 (Cpf1). Similar to Cas9, Cpf1 is also a class 2 CRISPR effector. It has been shown that Cpf1 mediates robust DNA interference with features distinct from Cas9. Cpf1 is a single RNA-guided endonuclease lacking tracrRNA, and it utilizes a T-rich protospacer-adjacent motif (TTN, TTTN, or YTN). Moreover, Cpf1 cleaves DNA via a staggered DNA double-stranded break. Out of 16 Cpf1-family proteins, two enzymes from Acidaminococcus and Lachnospiraceae are shown to have efficient genome-editing activity in human cells. Cpf1 proteins are known in the art and have been described previously, for example Yamano et al., “Crystal structure of Cpf1 in complex with guide RNA and target DNA.” Cell (165) 2016, p. 949-962; the entire contents of which is hereby incorporated by reference. The state of the art may also now refer to Cpf1 enzymes as Cas12a.

[0436] In still other embodiments, the Cas protein may include any CRISPR associated protein, including but not limited to, Cas12a, Cas12b, Cas1, Cas1B, Cas2, Cas3, Cas4, Cas5, Cas6, Cas7, Cas8, Cas9 (also known as Csn1 and Csx12), Cas10, Csy1, Csy2, Csy3, Cse1, Cse2, Csc1, Csc2, Csa5, Csn2. Csm2, Csm3, Csm4, Csm5, Csm6, Cmr1, Cmr3, Cmr4, Cmr5, Cmr6, Csb1, Csb2, Csb3, Csx17, Csx14, Csx10, Csx16, CsaX, Csx3, Csx1, Csx15, Csf1, Csf2, Csf3, Csf4, homologs thereof, or modified versions thereof, and preferably comprising a nickase mutation (e.g., a mutation corresponding to the D10A mutation of the wild type Cas9 polypeptide of SEQ ID NO: 5).

[0437] In various other embodiments, the napDNAbp can be any of the following proteins: a Cas9, a Cpf1, a CasX, a CasY, a C2c1, a C2c2, a C2c3, a GeoCas9, a CjCas9, a Cas12a, a Cas12b, a Cas12g, a Cas12h, a Cas12i, a Cas13b, a Cas13c, a Cas13d, a Cas14, a Csn2, an xCas9, an SpCas9-NG, a circularly permuted Cas9, or an Argonaute (Ago) domain, or a variant thereof.

[0438] Exemplary Cas9 equivalent protein sequences can include the following:

| Description | Sequence |
|---|---|
| AsCasl2a | MTQFEGFTNLYQVSKTLRFELIPQGKTLKHIQEQGFIEEDKARNDHYKELKPIIDRIYKTYADQCLQLVQLD |
| (previously | WENLSAAIDSYRKEKTEETRNALIEEQATYRNAIHDYFIGRTDNLTDAINKRHAEIYKGLFKAELFNGKVLK |
| known as | QLGTVTTTEHENALLRSFDKFTTYFSGFYENRKNVFSAEDISTAIPHRIVQDNFPKFKENCHIFTRLITAVP |
| Cpfl) | SLREHFENVKKAIGIFVSTSIEEVFSFPFYNQLLTQTQIDLYNQLLGGISREAGTEKIKGLNEVLNLAIQKN |
| Acidaminococcus | DETAHIIASLPHRFIPLFKQILSDRNTLSFILEEFKSDEEVIQSFCKYKTLLRNENVLETAEALFNELNSID |
| sp. | LTHIFISHKKLETISSALCDHWDTLRNALYERRISELTGKITKSAKEKVQRSLKHEDINLQEIISAAGKELS |
| (strain | EAFKQKTSEILSHAHAALDQPLPTTLKKQEEKEILKSQLDSLLGLYHLLDWFAVDESNEVDPEFSARLTGIK |
| BV3L6) | LEMEPSLSFYNKARNYATKKPYSVEKFKLNFQMPTLASGWDVNKEKNNGAILFVKNGLYYLGIMPKQKGRYK |
| UniProtKB | ALSFEPTEKTSEGFDKMYYDYFPDAAKMIPKCSTQLKAVTAHFQTHTTPILLSNNFIEPLEITKEIYDLNNP |
| U2UMQ6 | EKEPKKFQTAYAKKTGDQKGYREALCKWIDFTRDFLSKYTKTTSIDLSSLRPSSQYKDLGEYYAELNPLLYH |
| | ISFQRIAEKEIMDAVETGKLYLFQIYNKDFAKGHHGKPNLHTLYWTGLFSPENLAKTSIKLNGQAELFYRPK |
| | SRMKRMAHRLGEKMLNKKLKDQKTPIPDTLYQELYDYVNHRLSHDLSDEARALLPNVITKEVSHEIIKDRRF |
| | TSDKFFFHVPITLNYQAANSPSKFNQRVNAYLKEHPETPIIGIDRGERNLIYITVIDSTGKILEQRSLNTIQ |
| | QFDYQKKLDNREKERVAARQAWSVVGTIKDLKQGYLSQVIHEIVDLMIHYQAVVVLENLNFGFKSKRTGIAE |
| | KAVYQQFEKMLIDKLNCLVLKDYPAEKVGGVLNPYQLTDQFTSFAKMGTQSGFLFYVPAPYTSKIDPLTGFV |
| | DPFVWKTIKNHESRKHFLEGFDFLHYDVKTGDFILHFKMNRNLSFQRGLPGFMPAWDIVFEKNETQFDAKGT |
| | PFIAGKRIVPVIENHRFTGRYRDLYPANELIALLEEKGIVFRDGSNILPKLLENDDSHAIDTMVALIRSVLQ |
| | MRNSNAATGEDYINSPVRDLNGVCFDSRFQNPEWPMDADANGAYHIALKGQLLLNHLKESKDLKLQNGISNQ |
| | DWLAYIQELRN (SEQ ID NO: 51) |
| AsCasl2a | MTQFEGFTNLYQVSKTLRFELIPQGKTLKHIQEQGFIEEDKARNDHYKELKPIIDRIYKTYADQCLQLVQLD |
| nickase | WENLSAAIDSYRKEKTEETRNALIEEQATYRNAIHDYFIGRTDNLTDAINKRHAEIYKGLFKAELFNGKVLK |
| (e.g., | QLGTVTTTEHENALLRSFDKFTTYFSGFYENRKNVFSAEDISTAIPHRIVQDNFPKFKENCHIFTRLITAVP |
| R1226A) | SLREHFENVKKAIGIFVSTSIEEVFSFPFYNQLLTQTQIDLYNQLLGGISREAGTEKIKGLNEVLNLAIQKN |
| | DETAHIIASLPHRFIPLFKQILSDRNTLSFILEEFKSDEEVIQSFCKYKTLLRNENVLETAEALFNELNSID |
| | LTHIFISHKKLETISSALCDHWDTLRNALYERRISELTGKITKSAKEKVQRSLKHEDINLQEIISAAGKELS |
| | EAFKQKTSEILSHAHAALDQPLPTTLKKQEEKEILKSQLDSLLGLYHLLDWFAVDESNEVDPEFSARLTGIK |
| | LEMEPSLSFYNKARNYATKKPYSVEKFKLNFQMPTLASGWDVNKEKNNGAILFVKNGLYYLGIMPKQKGRYK |
| | ALSFEPTEKTSEGFDKMYYDYFPDAAKMIPKCSTQLKAVTAHFQTHTTPILLSNNFIEPLEITKEIYDLNNP |
| | EKEPKKFQTAYAKKTGDQKGYREALCKWIDFTRDFLSKYTKTTSIDLSSLRPSSQYKDLGEYYAELNPLLYH |
| | ISFQRIAEKEIMDAVETGKLYLFQIYNKDFAKGHHGKPNLHTLYWTGLFSPENLAKTSIKLNGQAELFYRPK |
| | SRMKRMAHRLGEKMLNKKLKDQKTPIPDTLYQELYDYVNHRLSHDLSDEARALLPNVITKEVSHEIIKDRRF |
| | TSDKFFFHVPITLNYQAANSPSKFNQRVNAYLKEHPETPIIGIDRGERNLIYITVIDSTGKILEQRSLNTIQ |
| | QFDYQKKLDNREKERVAARQAWSVVGTIKDLKQGYLSQVIHEIVDLMIHYQAVVVLENLNFGFKSKRTGIAE |
| | KAVYQQFEKMLIDKLNCLVLKDYPAEKVGGVLNPYQLTDQFTSFAKMGTQSGFLFYVPAPYTSKIDPLTGFV |
| | DPFVWKTIKNHESRKHFLEGFDFLHYDVKTGDFILHFKMNRNLSFQRGLPGFMPAWDIVFEKNETQFDAKGT |
| | PFIAGKRIVPVIENHRFTGRYRDLYPANELIALLEEKGIVFRDGSNILPKLLENDDSHAIDTMVALIRSVLQ |
| | MANSNAATGEDYINSPVRDLNGVCFDSRFQNPEWPMDADANGAYHIALKGQLLLNHLKESKDLKLQNGISNQ |
| | DWLAYIQELRN (SEQ ID NQ: 52) |
| LbCasl2a | MNYKTGLEDFIGKESLSKTLRNALIPTESTKIHMEEMGVIRDDELRAEKQQELKEIMDDYYRTFIEEKLGQI |
| (previousl | QGIQWNSLFQKMEETMEDISVRKDLDKIQNEKRKEICCYFTSDKRFKDLFNAKLITDILPNFIKDNKEYTEE |
| y known as | EKAEKEQTRVLFQRFATAFTNYFNQRRNNFSEDNISTAISFRIVNENSEIHLQNMRAFQRIEQQYPEEVCGM |
| Cpfl) | EEEYKDMLQEWQMKHIYSVDFYDRELTQPGIEYYNGICGKINEHMNQFCQKNRINKNDFRMKKLHKQILCKK |
| Lachnospiraceae | SSYYEIPFRFESDQEVYDALNEFIKTMKKKEIIRRCVHLGQECDDYDLGKIYISSNKYEQISNALYGSWDTI |
| bacterium | RKCIKEEYMDALPGKGEKKEEKAEAAAKKEEYRSIADIDKIISLYGSEMDRTISAKKCITEICDMAGQISID |
| GAM79 | PLVCNSDIKLLQNKEKTTEIKTILDSFLHVYQWGQTFIVSDIIEKDSYFYSELEDVLEDFEGITTLYNHVRS |
| Ref Seq. | YVTQKPYSTVKFKLHFGSPTLANGWSQSKEYDNNAILLMRDQKFYLGIFNVRNKPDKQIIKGHEKEEKGDYK |
| WP_1196233 | KMIYNLLPGPSKMLPKVFITSRSGQETYKPSKHILDGYNEKRHIKSSPKFDLGYCWDLIDYYKECIHKHPDW |
| 82.1 | KNYDFHFSDTKDYEDISGFYREVEMQGYQIKWTYISADEIQKLDEKGQIFLFQIYNKDFSVHSTGKDNLHTM |
| | YLKNLFSEENLKDIVLKLNGEAELFFRKASIKTPIVHKKGSVLVNRSYTQTVGNKEIRVSIPEEYYTEIYNY |
| | LNHIGKGKLSSEAQRYLDEGKIKSFTATKDIVKNYRYCCDHYFLHLPITINFKAKSDVAVNERTLAYIAKKE |
| | DIHIIGIDRGERNLLYISVVDVHGNIREQRSFNIVNGYDYQQKLKDREKSRDAARKNWEEIEKIKELKEGYL |
| | SMVIHYIAQLVVKYNAVVAMEDLNYGFKTGRFKVERQVYQKFETMLIEKLHYLVFKDREVCEEGGVLRGYQL |
| | TYIPESLKKVGKQCGFIFYVPAGYTSKIDPTTGFVNLFSFKNLTNRESRQDFVGKFDEIRYDRDKKMFEFSF |
| | DYNNYIKKGTILASTKWKVYTNGTRLKRIVVNGKYTSQSMEVELTDAMEKMLQRAGIEYHDGKDLKGQIVEK |
| | GIEAEIIDIFRLTVQMRNSRSESEDREYDRLISPVLNDKGEFFDTATADKTLPQDADANGAYCIALKGLYEV |
| | KQIKENWKENEQFPRNKLVQDNKTWFDFMQKKRYL (SEQ ID NO: 53) |
| PcCasl2a - | MAKNFEDFKRLYSLSKTLRFEAKPIGATLDNIVKSGLLDEDEHRAASYVKVKKLIDEYHKVFIDRVLDDGCL |
| previously | PLENKGNNNSLAEYYESYVSRAQDEDAKKKFKEIQQNLRSVIAKKLTEDKAYANLFGNKLIESYKDKEDKKK |
| known at | IIDSDLIQFINTAESTQLDSMSQDEAKELVKEFWGFVTYFYGFFDNRKNMYTAEEKSTGIAYRLVNENLPKF |
| Cpfl | IDNIEAFNRAITRPEIQENMGVLYSDFSEYLNVESIQEMFQLDYYNMLLTQKQIDVYNAIIGGKTDDEHDVK |
| Prevotella | IKGINEYINLYNQQHKDDKLPKLKALFKQILSDRNAISWLPEEFNSDQEVLNAIKDCYERLAENVLGDKVLK |
| copri | SLLGSLADYSLDGIFIRNDLQLTDISQKMFGNWGVIQNAIMQNIKRVAPARKHKESEEDYEKRIAGIFKKAD |
| Ref Seq. | SFSISYINDCLNEADPNNAYFVENYFATFGAVNTPTMQRENLFALVQNAYTEVAALLHSDYPTVKHLAQDKA |
| WP_1192277 | NVSKIKALLDAIKSLQHFVKPLLGKGDESDKDERFYGELASLWAELDTVTPLYNMIRNYMTRKPYSQKKIKL |
| 26.1 | NFENPQLLGGWDANKEKDYATIILRRNGLYYLAIMDKDSRKLLGKAMPSDGECYEKMVYKFFKDVTTMIPKC |
| | STQLKDVQAYFKVNTDDYVLNSKAFNKPLTITKEVFDLNNVLYGKYKKFQKGYLTATGDNVGYTHAVNVWIK |
| | FCMDFLNSYDSTCIYDFSSLKPESYLSLDAFYQDANLLLYKLSFARASVSYINQLVEEGKMYLFQIYNKDFS |
| | EYSKGTPNMHTLYWKALFDERNLADVVYKLNGQAEMFYRKKSIENTHPTHPANHPILNKNKDNKKKESLFDY |
| | DLIKDRRYTVDKFMFHVPITMNFKSVGSENINQDVKAYLRHADDMHIIGIDRGERHLLYLVVIDLQGNIKEQ |
| | YSLNEIVNEYNGNTYHTNYHDLLDVREEERLKARQSWQTIENIKELKEGYLSQVIHKITQLMVRYHAIVVLE |
| | DLSKGFMRSRQKVEKQVYQKFEKMLIDKLNYLVDKKTDVSTPGGLLNAYQLTCKSDSSQKLGKQSGFLFYIP |
| | AWNTSKIDPVTGFVNLLDTHSLNSKEKIKAFFSKFDAIRYNKDKKWFEFNLDYDKFGKKAEDTRTKWTLCTR |
| | GMRIDTFRNKEKNSQWDNQEVDLTTEMKSLLEHYYIDIHGNLKDAISAQTDKAFFTGLLHILKLTLQMRNSI |
| | TGTETDYLVSPVADENGIFYDSRSCGNQLPENADANGAYNIARKGLMLIEQIKNAEDLNNVKFDISNKAWLN |
| | FAQQKPYKNG (SEQ ID NO: 54) |
| ErCasl2a - | MFSAKLISDILPEFVIHNNNYSASEKEEKTQVIKLFSRFATSFKDYFKNRANCFSANDISSSSCHRIVNDNA |
| previously | EIFFSNALVYRRIVKNLSNDDINKISGDMKDSLKEMSLEEIYSYEKYGEFITQEGISFYNDICGKVNLFMNL |
| known at | YCQKNKENKNLYKLRKLHKQILCIADTSYEVPYKFESDEEVYQSVNGFLDNISSKHIVERLRKIGENYNGYN |
| Cpfl | LDKIYIVSKFYESVSQKTYRDWETINTALEIHYNNILPGNGKSKADKVKKAVKNDLQKSITEINELVSNYKL |
| Eubacterium | CPDDNIKAETYIHEISHILNNFEAQELKYNPEIHLVESELKASELKNVLDVIMNAFHWCSVFMTEELVDKDN |
| rectale | NFYAELEEIYDEIYPVISLYNLVRNYVTQKPYSTKKIKLNFGIPTLADGWSKSKEYSNNAIILMRDNLYYLG |
| Ref Seq. | IFNAKNKPDKKIIEGNTSENKGDYKKMIYNLLPGPNKMIPKVFLSSKTGVETYKPSAYILEGYKQNKHLKSS |
| WP_1192236 | KDFDITFCHDLIDYFKNCIAIHPEWKNFGFDFSDTSTYEDISGFYREVELQGYKIDWTYISEKDIDLLQEKG |
| 42.1 | QLYLFQIYNKDFSKKSSGNDNLHTMYLKNLFSEENLKDIVLKLNGEAEIFFRKSSIKNPIIHKKGSILVNRT |
| | YEAEEKDQFGNIQIVRKTIPENIYQELYKYFNDKSDKELSDEAAKLKNVVGHHEAATNIVKDYRYTYDKYFL |
| | HMPITINFKANKTSFINDRILQYIAKEKDLHVIGIDRGERNLIYVSVIDTCGNIVEQKSFNIVNGYDYQIKL |
| | KQQEGARQIARKEWKEIGKIKEIKEGYLSLVIHEISKMVIKYNAIIAMEDLSYGFKKGRFKVERQVYQKFET |
| | MLINKLNYLVFKDISITENGGLLKGYQLTYIPDKLKNVGHQCGCIFYVPAAYTSKIDPTTGFVNIFKFKDLT |
| | VDAKREFIKKFDSIRYDSDKNLFCFTFDYNNFITQNTVMSKSSWSVYTYGVRIKRRFVNGRFSNESDTIDIT |
| | KDMEKTLEMTDINWRDGHDLRQDIIDYEIVQHIFEIFKLTVQMRNSLSELEDRDYDRLISPVLNENNIFYDS |
| | AKAGDALPKDADANGAYCIALKGLYEIKQITENWKEDGKFSRDKLKISNKDWFDFIQNKRYL(SEQ ID |
| | NO: 55) |
| CsCas12a - | MNYKTGLEDFIGKESLSKTLRNALIPTESTKIHMEEMGVIRDDELRAEKQQELKEIMDDYYRAFIEEKLGQI |
| previously | QGIQWNSLFQKMEETMEDISVRKDLDKIQNEKRKEICCYFTSDKRFKDLFNAKLITDILPNFIKDNKEYTEE |
| known at | EKAEKEQTRVLFQRFATAFTNYFNQRRNNFSEDNISTAISFRIVNENSEIHLQNMRAFQRIEQQYPEEVCGM |
| Cpfl | EEEYKDMLQEWQMKHIYLVDFYDRVLTQPGIEYYNGICGKINEHMNQFCQKNRINKNDFRMKKLHKQILCKK |
| Clostridium | SSYYEIPFRFESDQEVYDALNEFIKTMKEKEIICRCVHLGQKCDDYDLGKIYISSNKYEQISNALYGSWDTI |
| sp. | RKCIKEEYMDALPGKGEKKEEKAEAAAKKEEYRSIADIDKIISLYGSEMDRTISAKKCITEICDMAGQISTD |
| AF34-10BH | PLVCNSDIKLLQNKEKTTEIKTILDSFLHVYQWGQTFIVSDIIEKDSYFYSELEDVLEDFEGITTLYNHVRS |
| Ref Seq. | YVTQKPYSTVKFKLHFGSPTLANGWSQSKEYDNNAILLMRDQKFYLGIFNVRNKPDKQIIKGHEKEEKGDYK |
| WP_1185384 | KMIYNLLPGPSKMLPKVFITSRSGQETYKPSKHILDGYNEKRHIKSSPKFDLGYCWDLIDYYKECIHKHPDW |
| 18.1 | KNYDFHFSDTKDYEDISGFYREVEMQGYQIKWTYISADEIQKLDEKGQIFLFQIYNKDFSVHSTGKDNLHTM |
| | YLKNLFSEENLKDIVLKLNGEAELFFRKASIKTPVVHKKGSVLVNRSYTQTVGDKEIRVSIPEEYYTEIYNY |
| | LNHIGRGKLSTEAQRYLEERKIKSFTATKDIVKNYRYCCDHYFLHLPITINFKAKSDIAVNERTLAYIAKKE |
| | DIHIIGIDRGERNLLYISVVDVHGNIREQRSFNIVNGYDYQQKLKDREKSRDAARKNWEEIEKIKELKEGYL |
| | SMVIHYIAQLVVKYNAVVAMEDLNYGFKTGRFKVERQVYQKFETMLIEKLHYLVFKDREVCEEGGVLRGYQL |
| | TYIPESLKKVGKQCGFIFYVPAGYTSKIDPTTGFVNLFSFKNLTNRESRQDFVGKFDEIRYDRDKKMFEFSF |
| | DYNNYIKKGTMLASTKWKVYTNGTRLKRIVVNGKYTSQSMEVELTDAMEKMLQRAGIEYHDGKDLKGQIVEK |
| | GIEAEIIDIFRLTVQMRNSRSESEDREYDRLISPVLNDKGEFFDTATADKTLPQDADANGAYCIALKGLYEV |
| | KOIKENWKENEOFPRNKLVODNKTWFDFMOKKRYL (SEQ ID NO: 56) |
| BhCas12b | MATRSFILKIEPNEEVKKGLWKTHEVLNHGIAYYMNILKLIRQEAIYEHHEQDPKNPKKVSKAEIQAELWDF |
| Bacillus | VLKMQKCNSFTHEVDKDEVFNILRELYEELVPSSVEKKGEANQLSNKFLYPLVDPNSQSGKGTASSGRKPRW |
| hisashii | YNLKIAGDPSWEEEKKKWEEDKKKDPLAKILGKLAEYGLIPLFIPYTDSNEPIVKEIKWMEKSRNQSVRRLD |
| Ref Seq. | KDMFIQALERFLSWESWNLKVKEEYEKVEKEYKTLEERIKEDIQALKALEQYEKERQEQLLRDTLNTNEYRL |
| WP 0951425 | SKRGLRGWREIIQKWLKMDENEPSEKYLEVFKDYQRKHPREAGDYSVYEFLSKKENHFIWRNHPEYPYLYAT |
| 15.1 | FCEIDKKKKDAKQQATFTLADPINHPLWVRFEERSGSNLNKYRILTEQLHTEKLKKKLTVQLDRLIYPTESG |
| | GWEEKGKVDIVLLPSRQFYNQIFLDIEEKGKHAFTYKDESIKFPLKGTLGGARVQFDRDHLRRYPHKVESGN |
| | VGRIYFNMTVNIEPTESPVSKSLKIHRDDFPKVVNFKPKELTEWIKDSKGKKLKSGIESLEIGLRVMSIDLG |
| | QRQAAAASIFEVVDQKPDIEGKLFFPIKGTELYAVHRASFNIKLPGETLVKSREVLRKAREDNLKLMNQKLN |
| | FLRNVLHFQQFEDITEREKRVTKWISRQENSDVPLVYQDELIQIRELMYKPYKDWVAFLKQLHKRLEVEIGK |
| | EVKHWRKSLSDGRKGLYGISLKNIDEIDRTRKFLLRWSLRPTEPGEVRRLEPGQRFAIDQLNHLNALKEDRL |
| | KKMANTIIMHALGYCYDVRKKKWQAKNPACQIILFEDLSNYNPYEERSRFENSKLMKWSRREIPRQVALQGE |
| | IYGLQVGEVGAQFSSRFHAKTGSPGIRCSVVTKEKLQDNRFFKNLQREGRLTLDKIAVLKEGDLYPDKGGEK |
| | FISLSKDRKCVTTHADINAAQNLQKRFWTRTHGFYKVYCKAYQVDGQTVYIPESKDQKQKIIEEFGEGYFIL |
| | KDGVYEWVNAGKLKIKKGSSKQSSSELVDSDILKDSFDLASELKGEKLMLYRDPSGNVFPSDKWMAAGVFFG |
| | KLERILISKLTNQYSISTIEDDSSKQSM (SEQ ID NO: 57) |
| ThCas12b | MSEKTTQRAYTLRLNRASGECAVCQNNSCDCWHDALWATHKAVNRGAKAFGDWLLTLRGGLCHTLVEMEVPA |
| Thermomonas | KGNNPPQRPTDQERRDRRVLLALSWLSVEDEHGAPKEFIVATGRDSADDRAKKVEEKLREILEKRDFQEHEI |
| hydrothermalis | DAWLQDCGPSLKAHIREDAVWVNRRALFDAAVERIKTLTWEEAWDFLEPFFGTQYFAGIGDGKDKDDAEGPA |
| Ref Seq. | RQGEKAKDLVQKAGQWLSARFGIGTGADFMSMAEAYEKIAKWASQAQNGDNGKATIEKLACALRPSEPPTLD |
| WP_0727548 | TVLKCISGPGHKSATREYLKTLDKKSTVTQEDLNQLRKLADEDARNCRKKVGKKGKKPWADEVLKDVENSCE |
| 38 | LTYLQDNSPARHREFSVMLDHAARRVSMAHSWIKKAEQRRRQFESDAQKLKNLQERAPSAVEWLDRFCESRS |
| | MTTGANTGSGYRIRKRAIEGWSYVVOAWAEASCDTEDKRIAAARKVOADPEIEKFGDIQLFEALAADEAICV |
| | WRDQEGTQNPSILIDYVTGKTAEHNQKRFKVPAYRHPDELRHPVFCDFGNSRWSIQFAIHKEIRDRDKGAKQ |
| | DTRQLQNRHGLKMRLWNGRSMTDVNLHWSSKRLTADLALDQNPNPNPTEVTRADRLGRAASSAFDHVKIKNV |
| | FNEKEWNGRLQAPRAELDRIAKLEEQGKTEQAEKLRKRLRWYVSFSPCLSPSGPFIVYAGQHNIQPKRSGQY |
| | APHAQANKGRARLAQLILSRLPDLRILSVDLGHRFAAACAVWETLSSDAFRREIQGLNVLAGGSGEGDLFLH |
| | VEMTGDDGKRRTVVYRRIGPDQLLDNTPHPAPWARLDRQFLIKLQGEDEGVREASNEELWTVHKLEVEVGRT |
| | VPLIDRMVRSGFGKTEKQKERLKKLRELGWISAMPNEPSAETDEKEGEIRSISRSVDELMSSALGTLRLALK |
| | RHGNRARIAFAMTADYKPMPGGQKYYFHEAKEASKNDDETKRRDNQIEFLQDALSLWHDLFSSPDWEDNEAK |
| | KLWQNHIATLPNYQTPEEISAELKRVERNKKRKENRDKLRTAAKALAENDQLRQHLHDTWKERWESDDQQWK |
| | ERLRSLKDWIFPRGKAEDNPSIRHVGGLSITRINTISGLYQILKAFKMRPEPDDLRKNIPQKGDDELENFNR |
| | RLLEARDRLREQRVKQLASRIIEAALGVGRIKIPKNGKLPKRPRTTVDTPCHAVVIESLKTYRPDDLRTRRE |
| | NRQLMQWSSAKVRKYLKEGCELYGLHFLEVPANYTSRQCSRTGLPGIRCDDVPTGDFLKAPWWRRAINTARE |
| | KNGGDAKDRFLVDLYDHLNNLQSKGEALPATVRVPRQGGNLFIAGAQLDDTNKERRAIQADLNAAANIGLRA |
| | LLDPDWRGRWWYVPCKDGTSEPALDRIEGSTAFNDVRSLPTGDNSSRRAPREIENLWRDPSGDSLESGTWSP |
| | TRAYWDTVQSRVIELLRRHAGLPTS (SEQ ID NO: 58) |
| LsCas12b | MSIRSFKLKLKTKSGVNAEQLRRGLWRTHQLINDGIAYYMNWLVLLRQEDLFIRNKETNEIEKRSKEEIQAV |
| Laceyella | LLERVHKQQQRNQWSGEVDEQTLLQALRQLYEEIVPSVIGKSGNASLKARFFLGPLVDPNNKTTKDVSKSGP |
| sacchari | TPKWKKMKDAGDPNWVQEYEKYMAERQTLVRLEEMGLIPLFPMYTDEVGDIHWLPQASGYTRTWDRDMFQQA |
| WP_1322218 | IERLLSWESWNRRVRERRAQFEKKTHDFASRFSESDVQWMNKLREYEAQQEKSLEENAFAPNEPYALTKKAL |
| 94.1 | RGWERVYHSWMRLDSAASEEAYWQEVATCQTAMRGEFGDPAIYQFLAQKENHDIWRGYPERVIDFAELNHLQ |
| | RELRRAKEDATFTLPDSVDHPLWVRYEAPGGTNIHGYDLVQDTKRNLTLILDKFILPDENGSWHEVKKVPFS |
| | LAKSKQFHRQVWLQEEQKQKKREVVFYDYSTNLPHLGTLAGAKLQWDRNFLNKRTQQQIEETGEIGKVFFNI |
| | SVDVRPAVEVKNGRLQNGLGKALTVLTHPDGTKIVTGWKAEQLEKWVGESGRVSSLGLDSLSEGLRVMSIDL |
| | GQRTSATVSVFEITKEAPDNPYKFFYQLEGTEMFAVHQRSFLLALPGENPPQKIKQMREIRWKERNRIKQQV |
| | DQLSAILRLHKKVNEDERIQAIDKLLQKVASWQLNEEIATAWNQALSQLYSKAKENDLQWNQAIKNAHHQLE |
| | PVVGKQISLWRKDLSTGRQGIAGLSLWSIEELEATKKLLTRWSKRSREPGVVKRIERFETFAKQIQHHINQV |
| | KENRLKQLANLIVMTALGYKYDQEQKKWIEVYPACQVVLFENLRSYRFSFERSRRENKKLMEWSHRSIPKLV |
| | QMQGELFGLQVADVYAAYSSRYHGRTGAPGIRCHALTEADLRNETNIIHELIEAGFIKEEHRPYLQQGDLVP |
| | WSGGELFATLQKPYDNPRILTLHADINAAQNIQKRFWHPSMWFRVNCESVMEGEIVTYVPKNKTVHKKQGKT |
| | FRFVKVEGSDVYEWAKWSKNRNKNTFSSITERKPPSSMILFRDPSGTFFKEQEWVEQKTFWGKVQSMIQAYM |
| | KKTIVQRMEE (SEQ ID NO: 59) |
| DtCas12b | MVLGRKDDTAELRRALWTTHEHVNLAVAEVERVLLRCRGRSYWTLDRRGDPVHVPESQVAEDALAMAREAQR |
| Dsulfonatronum | RNGWPVVGEDEEILLALRYLYEQIVPSCLLDDLGKPLKGDAQKIGTNYAGPLFDSDTCRRDEGKDVACCGPE |
| thiodismutans | HEVAGKYLGALPEWATPISKQEFDGKDASHLRFKATGGDDAFFRVSIEKANAWYEDPANQDALKNKAYNKDD |
| WP_0313864 | WKKEKDKGISSWAVKYIQKQLQLGQDPRTEVRRKLWLELGLLPLFIPVFDKTMVGNLWNRLAVRLALAHLLS |
| 37 | WESWNHRAVQDQALARAKRDELAALFLGMEDGFAGLREYELRRNESIKQHAFEPVDRPYVVSGRALRSWTRV |
| | REEWLRHGDTQESRKNICNRLQDRLRGKFGDPDVFHWLAEDGQEALWKERDCVTSFSLLNDADGLLEKRKGY |
| | ALMTFADARLHPRWAMYEAPGGSNLRTYQIRKTENGLWADVVLLSPRNESAAVEEKTFNVRLAPSGQLSNVS |
| | FDQIQKGSKMVGRCRYQSANQQFEGLLGGAEILFDRKRIANEQHGATDLASKPGHVWFKLTLDVRPQAPQGW |
| | LDGKGRPALPPEAKHFKTALSNKSKFADQVRPGLRVLSVDLGVRSFAACSVFELVRGGPDQGTYFPAADGRT |
| | VDDPEKLWAKHERSFKITLPGENPSRKEEIARRAAMEELRSLNGDIRRLKAILRLSVLQEDDPRTEHLRLFM |
| | EAIVDDPAKSALNAELFKGFGDDRFRSTPDLWKQHCHFFHDKAEKVVAERFSRWRTETRPKSSSWQDWRERR |
| | GYAGGKSYWAVTYLEAVRGLILRWNMRGRTYGEVNRQDKKQFGTVASALLHHINQLKEDRIKTGADMIIQAA |
| | RGFVPRKNGAGWVQVHEPCRLILFEDLARYRFRTDRSRRENSRLMRWSHREIVNEVGMQGELYGLHVDTTEA |
| | GFSSRYLASSGAPGVRCRHLVEEDFHDGLPGMHLVGELDWLLPKDKDRTANEARRLLGGMVRPGMLVPWDGG |
| | ELFATLNAASQLHVIHADINAAQNLQRRFWGRCGEAIRIVCNQLSVDGSTRYEMAKAPKARLLGALQQLKNG |
| | DAPFHLTSIPNSQKPENSYVMTPTNAGKKYRAGPGEKSSGEEDELALDIVEQAEELAQGRKTFFRDPSGVEE |
| | APDRWLPSEIYWSRIRRRIWQVTLERNSSGRQERAEMDEMPY (SEQ ID NO: 60) |

[0439] The base editors described herein may also comprise Cas12a/Cpf1 (dCpf1) variants that may be used as a guide nucleotide sequence-programmable DNA-binding protein domain. The Cas12a/Cpf1 protein has a RuvC-like endonuclease domain that is similar to the RuvC domain of Cas9 but does not have a HNH endonuclease domain, and the N-terminal of Cpf1 does not have the alfa-helical recognition lobe of Cas9. It was shown in Zetsche et al., Cell, 163, 759-771, 2015 (which is incorporated herein by reference) that, the RuvC-like domain of Cpf1 is responsible for cleaving both DNA strands and inactivation of the RuvC-like domain inactivates Cpf1 nuclease activity.

[0440] (8) Cas9 Equivalents with Expanded PAM Sequence

[0441] In some embodiments, the napDNAbp is a nucleic acid programmable DNA binding protein that does not require a canonical (NGG) PAM sequence. In some embodiments, the napDNAbp is an argonaute protein. One example of such a nucleic acid programmable DNA binding protein is an Argonaute protein from Natronobacterium gregoryi (NgAgo). NgAgo is a ssDNA-guided endonuclease. NgAgo binds 5′ phosphorylated ssDNA of ˜24 nucleotides (gDNA) to guide it to its target site and will make DNA double-strand breaks at the gDNA site. In contrast to Cas9, the NgAgo-gDNA system does not require a protospacer-adjacent motif (PAM). Using a nuclease inactive NgAgo (dNgAgo) can greatly expand the bases that may be targeted. The characterization and use of NgAgo have been described in Gao et al., Nat Biotechnol., 2016 July; 34(7):768-73. PubMed PMID: 27136078; Swarts et al., Nature. 507(7491) (2014):258-61; and Swarts et al., Nucleic Acids Res. 43(10) (2015):5120-9, each of which is incorporated herein by reference.

[0442] In some embodiments, the napDNAbp is a prokaryotic homolog of an Argonaute protein. Prokaryotic homologs of Argonaute proteins are known and have been described, for example, in Makarova K., et al., “Prokaryotic homologs of Argonaute proteins are predicted to function as key components of a novel system of defense against mobile genetic elements”, Biol Direct. 2009 Aug. 25; 4:29. doi: 10.1186/1745-6150-4-29, the entire contents of which is hereby incorporated by reference. In some embodiments, the napDNAbp is a Marinitoga piezophila Argunaute (MpAgo) protein. The CRISPR-associated Marinitoga piezophila Argunaute (MpAgo) protein cleaves single-stranded target sequences using 5′-phosphorylated guides. The 5′ guides are used by all known Argonautes. The crystal structure of an MpAgo-RNA complex shows a guide strand binding site comprising residues that block 5′ phosphate interactions. This data suggests the evolution of an Argonaute subclass with noncanonical specificity for a 5′-hydroxylated guide. See, e.g., Kaya et al., “A bacterial Argonaute with noncanonical guide RNA specificity”, Proc Natl Acad Sci USA. 2016 Apr. 12; 113(15):4057-62, the entire contents of which are hereby incorporated by reference). It should be appreciated that other argonaute proteins may be used, and are within the scope of this disclosure.

[0443] In some embodiments, the napDNAbp is a single effector of a microbial CRISPR-Cas system. Single effectors of microbial CRISPR-Cas systems include, without limitation, Cas9, Cpf1, C2c1, C2c2, and C2c3. Typically, microbial CRISPR-Cas systems are divided into Class 1 and Class 2 systems. Class 1 systems have multisubunit effector complexes, while Class 2 systems have a single protein effector. For example, Cas9 and Cpf1 are Class 2 effectors. In addition to Cas9 and Cpf1, three distinct Class 2 CRISPR-Cas systems (C2c1, C2c2, and C2c3) have been described by Shmakov et al., “Discovery and Functional Characterization of Diverse Class 2 CRISPR Cas Systems”, Mol. Cell, 2015 Nov. 5; 60(3): 385-397, the entire contents of which is hereby incorporated by reference. Effectors of two of the systems, C2c1 and C2c3, contain RuvC-like endonuclease domains related to Cpf1. A third system, C2c2 contains an effector with two predicated HEPN RNase domains. Production of mature CRISPR RNA is tracrRNA-independent, unlike production of CRISPR RNA by C2c1. C2c1 depends on both CRISPR RNA and tracrRNA for DNA cleavage. Bacterial C2c2 has been shown to possess a unique RNase activity for CRISPR RNA maturation distinct from its RNA-activated single-stranded RNA degradation activity. These RNase functions are different from each other and from the CRISPR RNA-processing behavior of Cpf1. See, e.g., East-Seletsky, et al., “Two distinct RNase activities of CRISPR-C2c2 enable guide-RNA processing and RNA detection”, Nature, 2016 Oct. 13; 538(7624):270-273, the entire contents of which are hereby incorporated by reference. In vitro biochemical analysis of C2c2 in Leptotrichia shahii has shown that C2c2 is guided by a single CRISPR RNA and can be programed to cleave ssRNA targets carrying complementary protospacers. Catalytic residues in the two conserved HEPN domains mediate cleavage. Mutations in the catalytic residues generate catalytically inactive RNA-binding proteins. See e.g., Abudayyeh et al., “C2c2 is a single-component programmable RNA-guided RNA-targeting CRISPR effector”, Science, 2016 Aug. 5; 353(6299), the entire contents of which are hereby incorporated by reference.

[0444] The crystal structure of Alicyclobaccillus acidoterrastris C2c1 (AacC2c1) has been reported in complex with a chimeric single-molecule guide RNA (sgRNA). See e.g., Liu et al., “C2c1-sgRNA Complex Structure Reveals RNA-Guided DNA Cleavage Mechanism”, Mol. Cell, 2017 Jan. 19; 65(2):310-322, the entire contents of which are hereby incorporated by reference. The crystal structure has also been reported in Alicyclobacillus acidoterrestris C2c1 bound to target DNAs as ternary complexes. See e.g., Yang et al., “PAM-dependent Target DNA Recognition and Cleavage by C2C1 CRISPR-Cas endonuclease”, Cell, 2016 Dec. 15; 167(7):1814-1828, the entire contents of which are hereby incorporated by reference. Catalytically competent conformations of AacC2c1, both with target and non-target DNA strands, have been captured independently positioned within a single RuvC catalytic pocket, with C2c1-mediated cleavage resulting in a staggered seven-nucleotide break of target DNA. Structural comparisons between C2c1 ternary complexes and previously identified Cas9 and Cpf1 counterparts demonstrate the diversity of mechanisms used by CRISPR-Cas9 systems.

[0445] In some embodiments, the napDNAbp may be a C2c1, a C2c2, or a C2c3 protein. In some embodiments, the napDNAbp is a C2c1 protein. In some embodiments, the napDNAbp is a C2c2 protein. In some embodiments, the napDNAbp is a C2c3 protein. In some embodiments, the napDNAbp comprises an amino acid sequence that is at least 85%, at least 90%, at least 91%, at least 92%, at least 93%, at least 94%, at least 95%, at least 96%, at least 97%, at least 98%, at least 99%, or at least 99.5% identical to a naturally-occurring C2c1, C2c2, or C2c3 protein. In some embodiments, the napDNAbp is a naturally-occurring C2c1, C2c2, or C2c3 protein.

[0446] Some aspects of the disclosure provide Cas9 domains that have different PAM specificities. Typically, Cas9 proteins, such as Cas9 from S. pyogenes (spCas9), require a canonical NGG PAM sequence to bind a particular nucleic acid region. This may limit the ability to edit desired bases within a genome. In some embodiments, the base editing fusion proteins provided herein may need to be placed at a precise location, for example where a target base is placed within a 4 base region (e.g., a “editing window”), which is approximately 15 bases upstream of the PAM. See Komor, A. C., et al., “Programmable editing of a target base in genomic DNA without double-stranded DNA cleavage” Nature 533, 420-424 (2016), the entire contents of which are hereby incorporated by reference. Accordingly, in some embodiments, any of the fusion proteins provided herein may contain a Cas9 domain that is capable of binding a nucleotide sequence that does not contain a canonical (e.g., NGG) PAM sequence. Cas9 domains that bind to non-canonical PAM sequences have been described in the art and would be apparent to the skilled artisan. For example, Cas9 domains that bind non-canonical PAM sequences have been described in Kleinstiver, B. P., et al., “Engineered CRISPR-Cas9 nucleases with altered PAM specificities” Nature 523, 481-485 (2015); and Kleinstiver, B. P., et al., “Broadening the targeting range of Staphylococcus aureus CRISPR-Cas9 by modifying PAM recognition” Nature Biotechnology 33, 1293-1298 (2015); the entire contents of each are hereby incorporated by reference.

[0447] For example, a napDNAbp domain with altered PAM specificity, such as a domain with at least 80%, at least 85%, at least 90%, at least 95%, or at least 99% sequence identity with wild type Francisella novicida Cpf1 (SEQ ID NO: 61) (D917, E1006, and D1255), which has the following amino acid sequence:

(SEQ ID NO: 61)
MSIYQEFVNKYSLSKTLRFELIPQGKTLENIKARG
LILDDEKRAKDYKKAKQIIDKYHQFFIEEILSSVC
ISEDLLQNYSDVYFKLKKSDDDNLQKDFKSAKDTI
KKQISEYIKDSEKFKNLFNQNLIDAKKGQESDLIL
WLKQSKDNGIELFKANSDITDIDEALEIIKSFKGW
TTYFKGFHENRKNVYSSNDIPTSIIYRIVDDNLPK
FLENKAKYESLKDKAPEAINYEQIKKDLAEELTFD
IDYKTSEVNQRVFSLDEVFEIANFNNYLNQSGITK
FNTIIGGKFVNGENTKRKGINEYINLYSQQINDKT
LKKYKMSVLFKQILSDTESKSFVIDKLEDDSDVVT
TMQSFYEQIAAFKTVEEKSIKETLSLLFDDLKAQK
LDLSKIYFKNDKSLTDLSQQVFDDYSVIGTAVLEY
ITQQIAPKNLDNPSKKEQELIAKKTEKAKYLSLET
IKLALEEFNKHRDIDKQCRFEEILANFAAIPMIFD
EIAQNKDNLAQISIKYQNQGKKDLLQASAEDDVKA
IKDLLDQTNNLLHKLKIFHISQSEDKANILDKDEH
FYLVFEECYFELANIVPLYNKIRNYITQKPYSDEK
FKLNFENSTLANGWDKNKEPDNTAILFIKDDKYYL
GVMNKKNNKIFDDKAIKENKGEGYKKIVYKLLPGA
NKMLPKVFFSAKSIKFYNPSEDILRIRNHSTHTKN
GSPQKGYEKFEFNIEDCRKFIDFYKQSISKHPEWK
DFGFRFSDTQRYNSIDEFYREVENQGYKLTFENIS
ESYIDSVVNQGKLYLFQIYNKDFSAYSKGRPNLHT
LYWKALFDERNLQDVVYKLNGEAELFYRKQSIPKK
ITHPAKEAIANKNKDNPKKESVFEYDLIKDKRFTE
DKFFFHCPITINFKSSGANKFNDEINLLLKEKAND
VHILSIDRGERHLAYYTLVDGKGNIIKQDTFNIIG
NDRMKTNYHDKLAAIEKDRDSARKDWKKINNIKEM
KEGYLSQVVHEIAKLVIEYNAIVVFEDLNFGFKRG
RFKVEKQVYQKLEKMLIEKLNYLVFKDNEFDKTGG
VLRAYQLTAPFETFKKMGKQTGIIYYVPAGFTSKI
CPVTGFVNQLYPKYESVSKSQEFFSKFDKICYNLD
KGYFEFSFDYKNFGDKAAKGKWTIASFGSRLINFR
NSDKNHNWDTREVYPTKELEKLLKDYSIEYGHGEC
IKAAICGESDKKFFAKLTSVLNTILQMRNSKTGTE
LDYLISPVADVNGNFFDSRQAPKNMPQDADANGAY
HIGLKGLMLLGRIKNNQEGKKLNLVIKNEEYFEFV
QNRNN

[0448] An additional napDNAbp domain with altered PAM specificity, such as a domain having at least 80%, at least 85%, at least 90%, at least 95%, or at least 99% sequence identity with wild type Geobacillus thermodenitrificans Cas9 (SEQ ID NO: 62), which has the following amino acid sequence:

(SEQ ID NO: 62)
MKYKIGLDIGITSIGWAVINLDIPRIEDLGVRIFD
RAENPKTGESLALPRRLARSARRRLRRRKHRLERI
RRLFVREGILTKEELNKLFEKKHEIDVWQLRVEAL
DRKLNNDELARILLHLAKRRGFRSNRKSERTNKEN
STMLKHIEENQSILSSYRTVAEMVVKDPKFSLHKR
NKEDNYTNTVARDDLEREIKLIFAKQREYGNIVCT
EAFEHEYISIWASQRPFASKDDIEKKVGFCTFEPK
EKRAPKATYTFQSFTVWEHINKLRLVSPGGIRALT
DDERRLIYKQAFHKNKITFHDVRTLLNLPDDTRFK
GLLYDRNTTLKENEKVRFLELGAYHKIRKAIDSVY
GKGAAKSFRPIDFDTFGYALTMFKDDTDIRSYLRN
EYEQNGKRMENLADKVYDEELIEELLNLSFSKFGH
LSLKALRNILPYMEQGEVYSTACERAGYTFTGPKK
KQKTVLLPNIPPIANPVVMRALTQARKVVNAIIKK
YGSPVSIHIELARELSQSFDERRKMQKEQEGNRKK
NETAIRQLVEYGLTLNPTGLDIVKFKLWSEQNGKC
AYSLQPIEIERLLEPGYTEVDHVIPYSRSLDDSYT
NKVLVLTKENREKGNRTPAEYLGLGSERWQQFETF
VLTNKQFSKKKRDRLLRLHYDENEENEFKNRNLND
TRYISRFLANFIREHLKFADSDDKQKVYTVNGRIT
AHLRSRWNFNKNREESNLHHAVDAAIVACTTPSDI
ARVTAFYQRREQNKELSKKTDPQFPQPWPHFADEL
QARLSKNPKESIKALNLGNYDNEKLESLQPVFVSR
MPKRSITGAAHQETLRRYIGIDERSGKIQTVVKKK
LSEIQLDKTGHFPMYGKESDPRTYEAIRQRLLEHN
NDPKKAFQEPLYKPKKNGELGPIIRTIKIIDTTNQ
VIPLNDGKTVAYNSNIVRVDVFEKDGKYYCVPIYT
IDMMKGILPNKAIEPNKPYSEWKEMTEDYTFRFSL
YPNDLIRIEFPREKTIKTAVGEEIKIKDLFAYYQT
IDSSNGGLSLVSHDNNFSLRSIGSRTLKRFEKYQV
DVLGNIYKVRGEKRVGVASSSHSKAGETIRPL

[0449] In some embodiments, the nucleic acid programmable DNA binding protein (napDNAbp) is a nucleic acid programmable DNA binding protein that does not require a canonical (NGG) PAM sequence. In some embodiments, the napDNAbp is an argonaute protein. One example of such a nucleic acid programmable DNA binding protein is an Argonaute protein from Natronobacterium gregoryi (NgAgo). NgAgo is a ssDNA-guided endonuclease. NgAgo binds 5′ phosphorylated ssDNA of ˜24 nucleotides (gDNA) to guide it to its target site and will make DNA double-strand breaks at the gDNA site. In contrast to Cas9, the NgAgo-gDNA system does not require a protospacer-adjacent motif (PAM). Using a nuclease inactive NgAgo (dNgAgo) can greatly expand the bases that may be targeted. The characterization and use of NgAgo have been described in Gao et al., Nat Biotechnol., 34(7): 768-73 (2016), PubMed PMID: 27136078; Swarts et al., Nature, 507(7491): 258-61 (2014); and Swarts et al., Nucleic Acids Res. 43(10) (2015): 5120-9, each of which is incorporated herein by reference. The sequence of Natronobacterium gregoryi Argonaute is provided in SEQ ID NO: 63.

[0450] The disclosed fusion proteins may comprise a napDNAbp domain having at least 80%, at least 85%, at least 90%, at least 95%, or at least 99% sequence identity with wild type Natronobacterium gregoryi Argonaute (SEQ ID NO: 63), which has the following amino acid sequence:

(SEQ ID NO: 63)
MTVIDLDSTTTADELTSGHTYDISVTLTGVYDNTD
EQHPRMSLAFEQDNGERRYITLWKNTTPKDVFTYD
YATGSTYIFTNIDYEVKDGYENLTATYQTTVENAT
AQEVGTTDEDETFAGGEPLDHHLDDALNETPDDAE
TESDSGHVMTSFASRDQLPEWTLHTYTLTATDGAK
TDTEYARRTLAYTVRQELYTDHDAAPVATDGLMLL
TPEPLGETPLDLDCGVRVEADETRTLDYTTAKDRL
LARELVEEGLKRSLWDDYLVRGIDEVLSKEPVLTC
DEFDLHERYDLSVEVGHSGRAYLHINFRHRFVPKL
TLADIDDDNIYPGLRVKTTYRPRRGHIVWGLRDEC
ATDSLNTLGNQSVVAYHRNNQTPINTDLLDAIEAA
DRRVVETRRQGHGDDAVSFPQELLAVEPNTHQIKQ
FASDGFHQQARSKTRLSASRCSEKAQAFAERLDPV
RLNGSTVEFSSEFFTGNNEQQLRLLYENGESVLTF
RDGARGAHPDETFSKGIVNPPESFEVAVVLPEQQA
DTCKAQWDTMADLLNQAGAPPTRSETVQYDAFSSP
ESISLNVAGAIDPSEVDAAFVVLPPDQEGFADLAS
PTETYDELKKALANMGIYSQMAYFDRFRDAKIFYT
RNVALGLLAAAGGVAFTTEHAMPGDADMFIGIDVS
RSYPEDGASGQINIAATATAVYKDGTILGHSSTRP
QLGEKLQSTDVRDIMKNAILGYQQVTGESPTHIVI
HRDGFMNEDLDPATEFLNEQGVEYDIVEIRKQPQT
RLLAVSDVQYDTPVKSIAAINQNEPRATVATFGAP
EYLATRDGGGLPRPIQIERVAGETDIETLTRQVYL
LSQSHIQVHNSTARLPITTAYADQASTHATKGYLV
QTGAFESNVGFL

[0451] (9) Cas9 Circular Permutants

[0452] In various embodiments, the base editors disclosed herein may comprise a circular permutant of Cas9.

[0453] The term “circularly permuted Cas9” or “circular permutant” of Cas9 or “CP-Cas9”) refers to any Cas9 protein, or variant thereof, that occurs or has been modify to engineered as a circular permutant variant, which means the N-terminus and the C-terminus of a Cas9 protein (e.g., a wild type Cas9 protein) have been topically rearranged. Such circularly permuted Cas9 proteins, or variants thereof, retain the ability to bind DNA when complexed with a guide RNA (gRNA). See, Oakes et al., “Protein Engineering of Cas9 for enhanced function,” Methods Enzymol, 2014, 546: 491-511 and Oakes et al., “CRISPR-Cas9 Circular Permutants as Programmable Scaffolds for Genome Modification,” Cell, Jan. 10, 2019, 176: 254-267, each of are incorporated herein by reference. The instant disclosure contemplates any previously known CP-Cas9 or use a new CP-Cas9 so long as the resulting circularly permuted protein retains the ability to bind DNA when complexed with a guide RNA (gRNA).

[0454] Any of the Cas9 proteins described herein, including any variant, ortholog, or naturally occurring Cas9 or equivalent thereof, may be reconfigured as a circular permutant variant.

[0455] In various embodiments, the circular permutants of Cas9 may have the following structure: N-terminus-[original C-terminus]-[optional linker]-[original N-terminus]-C-terminus.

[0456] As an example, the present disclosure contemplates the following circular permutants of canonical S. pyogenes Cas9 (1368 amino acids of UniProtKB-Q99ZW2 (CAS9_STRP1) (numbering is based on the amino acid position in SEQ ID NO: 5)): N-terminus-[1268-1368]-[optional linker]-[1-1267]-C-terminus; N-terminus-[1168-1368]-[optional linker]-[1-1167]-C-terminus; N-terminus-[1068-1368]-[optional linker]-[1-1067]-C-terminus; N-terminus-[968-1368]-[optional linker]-[1-967]-C-terminus; N-terminus-[868-1368]-[optional linker]-[1-867]-C-terminus; N-terminus-[768-1368]-[optional linker]-[1-767]-C-terminus; N-terminus-[668-1368]-[optional linker]-[1-667]-C-terminus; N-terminus-[568-1368]-[optional linker]-[1-567]-C-terminus; N-terminus-[468-1368]-[optional linker]-[1-467]-C-terminus; N-terminus-[368-1368]-[optional linker]-[1-367]-C-terminus; N-terminus-[268-1368]-[optional linker]-[1-267]-C-terminus; N-terminus-[168-1368]-[optional linker]-[1-167]-C-terminus; N-terminus-[68-1368]-[optional linker]-[1-67]-C-terminus; or N-terminus-[10-1368]-[optional linker]-[1-9]-C-terminus, or the corresponding circular permutants of other Cas9 proteins (including other Cas9 orthologs, variants, etc).

[0457] In particular embodiments, the circular permutant Cas9 has the following structure (based on S. pyogenes Cas9 (1368 amino acids of UniProtKB—Q99ZW2 (CAS9_STRP1) (numbering is based on the amino acid position in SEQ ID NO: 5): N-terminus-[102-1368]-[optional linker]-[1-101]-C-terminus; N-terminus-[1028-1368]-[optional linker]-[1-1027]-C-terminus; N-terminus-[1041-1368]-[optional linker]-[1-1043]-C-terminus; N-terminus-[1249-1368]-[optional linker]-[1-1248]-C-terminus; or N-terminus-[1300-1368]-[optional linker]-[1-1299]-C-terminus, or the corresponding circular permutants of other Cas9 proteins (including other Cas9 orthologs, variants, etc).

[0458] In still other embodiments, the circular permutant Cas9 has the following structure (based on S. pyogenes Cas9 (1368 amino acids of UniProtKB—Q99ZW2 (CAS9_STRP1) (numbering is based on the amino acid position in SEQ ID NO: 5): N-terminus-[103-1368]-[optional linker]-[1-102]-C-terminus; N-terminus-[1029-1368]-[optional linker]-[1-1028]-C-terminus; N-terminus-[1042-1368]-[optional linker]-[1-1041]-C-terminus; N-terminus-[1250-1368]-[optional linker]-[1-1249]-C-terminus; or N-terminus-[1301-1368]-[optional linker]-[1-1300]-C-terminus, or the corresponding circular permutants of other Cas9 proteins (including other Cas9 orthologs, variants, etc).

[0459] In some embodiments, the circular permutant can be formed by linking a C-terminal fragment of a Cas9 to an N-terminal fragment of a Cas9, either directly or by using a linker, such as an amino acid linker. In some embodiments, The C-terminal fragment may correspond to the C-terminal 95% or more of the amino acids of a Cas9 (e.g., amino acids about 1300-1368), or the C-terminal 90%, 85%, 80%, 75%, 70%, 65%, 60%, 55%, 50%, 45%, 40%, 35%, 30%, 25%, 20%, 15%, 10%, or 5% or more of a Cas9 (e.g., any one of SEQ ID NOs: 5, 8, 10, 12-26). The N-terminal portion may correspond to the N-terminal 95% or more of the amino acids of a Cas9 (e.g., amino acids about 1-1300), or the N-terminal 90%, 85%, 80%, 75%, 70%, 65%, 60%, 55%, 50%, 45%, 40%, 35%, 30%, 25%, 20%, 15%, 10%, or 5% or more of a Cas9 (e.g., of SEQ ID NO: 5, 8, 10, 12-26).

[0460] In some embodiments, the circular permutant can be formed by linking a C-terminal fragment of a Cas9 to an N-terminal fragment of a Cas9, either directly or by using a linker, such as an amino acid linker. In some embodiments, the C-terminal fragment that is rearranged to the N-terminus, includes or corresponds to the C-terminal 30% or less of the amino acids of a Cas9 (e.g., amino acids 1012-1368 of SEQ ID NO: 5). In some embodiments, the C-terminal fragment that is rearranged to the N-terminus, includes or corresponds to the C-terminal 30%, 29%, 28%, 27%, 26%, 25%, 24%, 23%, 22%, 21%, 20%, 19%, 18%, 17%, 16%, 15%, 14%, 13%, 12%, 11%, 10%, 9%, 8%, 7%, 6%, 5%, 4%, 3%, 2%, or 1% of the amino acids of a Cas9 (e.g., the Cas9 of SEQ ID NO: 5). In some embodiments, the C-terminal fragment that is rearranged to the N-terminus, includes or corresponds to the C-terminal 410 residues or less of a Cas9 (e.g., the Cas9 of SEQ ID NO: 5). In some embodiments, the C-terminal portion that is rearranged to the N-terminus, includes or corresponds to the C-terminal 410, 400, 390, 380, 370, 360, 350, 340, 330, 320, 310, 300, 290, 280, 270, 260, 250, 240, 230, 220, 210, 200, 190, 180, 170, 160, 150, 140, 130, 120, 110, 100, 90, 80, 70, 60, 50, 40, 30, 20, or 10 residues of a Cas9 (e.g., the Cas9 of SEQ ID NO: 5). In some embodiments, the C-terminal portion that is rearranged to the N-terminus, includes or corresponds to the C-terminal 357, 341, 328, 120, or 69 residues of a Cas9 (e.g., the Cas9 of SEQ ID NO: 5).

[0461] In other embodiments, circular permutant Cas9 variants may be defined as a topological rearrangement of a Cas9 primary structure based on the following method, which is based on S. pyogenes Cas9 of SEQ ID NO: 5: (a) selecting a circular permutant (CP) site corresponding to an internal amino acid residue of the Cas9 primary structure, which dissects the original protein into two halves: an N-terminal region and a C-terminal region; (b) modifying the Cas9 protein sequence (e.g., by genetic engineering techniques) by moving the original C-terminal region (comprising the CP site amino acid) to precede the original N-terminal region, thereby forming a new N-terminus of the Cas9 protein that now begins with the CP site amino acid residue. The CP site can be located in any domain of the Cas9 protein, including, for example, the helical-II domain, the RuvCIII domain, or the CTD domain. For example, the CP site may be located (relative the S. pyogenes Cas9 of SEQ ID NO: 5) at original amino acid residue 181, 199, 230, 270, 310, 1010, 1016, 1023, 1029, 1041, 1247, 1249, or 1282. Thus, once relocated to the N-terminus, original amino acid 181, 199, 230, 270, 310, 1010, 1016, 1023, 1029, 1041, 1247, 1249, or 1282 would become the new N-terminal amino acid. Nomenclature of these CP-Cas9 proteins may be referred to as Cas9-CP¹⁸¹, Cas9-CP¹⁹⁹, Cas9-CP²³⁰, Cas9-CP²⁷⁰, Cas9-CP³¹⁰, Cas9-CP¹⁰¹⁰, Cas9-CP¹⁰¹⁶, Cas9-CP¹⁰²³, Cas9-CP¹⁰²⁹, Cas9-CP¹⁰⁴¹, Cas9-CP¹²⁴⁷, Cas9-CP¹²⁴⁹, and Cas9-CP¹²⁸², respectively. This description is not meant to be limited to making CP variants from SEQ ID NO: 5, but may be implemented to make CP variants in any Cas9 sequence, either at CP sites that correspond to these positions, or at other CP sites entirely. This description is not meant to limit the specific CP sites in any way. Virtually any CP site may be used to form a CP-Cas9 variant.

[0462] Exemplary CP-Cas9 amino acid sequences, based on the Cas9 of SEQ ID NO: 5, are provided below in which linker sequences are indicated by underlining and optional methionine (M) residues are indicated in bold. It should be appreciated that the disclosure provides CP-Cas9 sequences that do not include a linker sequence or that include different linker sequences. It should be appreciated that CP-Cas9 sequences may be based on Cas9 sequences other than that of SEQ ID NO: 5 and any examples provided herein are not meant to be limiting. Exemplary CP-Cas9 sequences are as follows:

| CP name | Sequence | SEQ ID NO: |
|---|---|---|
| CP1012 | DYKVYDVRKMIAKSEQEIGKATAKYFFYSNIMNFFKTEITLANGEIRKRPLIETN | SEQ ID NO: 64 |
| | GETGEIVWDKGRDFATVRKVLSMPQVNIVKKTEVQTGGFSKESILPKRNSDKLIA | |
| | RKKDWDPKKYGGFDSPTVAYSVLVVAKVEKGKSKKLKSVKELLGITIMERSSFEK | |
| | NPIDFLEAKGYKEVKKDLIIKLPKYSLFELENGRKRMLASAGELQKGNELALPSK | |
| | YVNFLYLASHYEKLKGSPEDNEQKQLFVEQHKHYLDEIIEQISEFSKRVILADAN | |
| | LDKVLSAYNKHRDKPIREQAENIIHLFTLTNLGAPAAFKYFDTTIDRKRYTSTKE | |
| | VLDATLIHQSITGLYETRIDLSQLGGDGGSGGSGGSGGSGGSGGSGGDKKYSIGL | |
| | AIGTNSVGWAVITDEYKVPSKKFKVLGNTDRHSIKKNLIGALLFDSGETAEATRL | |
| | KRTARRRYTRRKNRICYLQEIFSNEMAKVDDSFFHRLEESFLVEEDKKHERHPIF | |
| | GNIVDEVAYHEKYPTIYHLRKKLVDSTDKADLRLIYLALAHMIKFRGHFLIEGDL | |
| | NPDNSDVDKLFIQLVQTYNQLFEENPINASGVDAKAILSARLSKSRRLENLIAQL | |
| | PGEKKNGLFGNLIALSLGLTPNFKSNFDLAEDAKLQLSKDTYDDDLDNLLAQIGD | |
| | QYADLFLAAKNLSDAILLSDILRVNTEITKAPLSASMIKRYDEHHQDLTLLKALV | |
| | RQQLPEKYKEIFFDQSKNGYAGYIDGGASQEEFYKFIKPILEKMDGTEELLVKLN | |
| | REDLLRKQRTFDNGSIPHQIHLGELHAILRRQEDFYPFLKDNREKIEKILTFRIP | |
| | YYVGPLARGNSRFAWMTRKSEETITPWNFEEVVDKGASAQSFIERMTNFDKNLPN | |
| | EKVLPKHSLLYEYFTVYNELTKVKYVTEGMRKPAFLSGEQKKAIVDLLFKTNRKV | |
| | TVKQLKEDYFKKIECFDSVEISGVEDRFNASLGTYHDLLKIIKDKDFLDNEENED | |
| | ILEDIVLTLTLFEDREMIEERLKTYAHLFDDKVMKQLKRRRYTGWGRLSRKLING | |
| | IRDKQSGKTILDFLKSDGFANRNFMQLIHDDSLTFKEDIQKAQVSGQGDSLHEHI | |
| | ANLAGSPAIKKGILQTVKVVDELVKVMGRHKPENIVIEMARENQTTQKGQKNSRE | |
| | RMKRIEEGIKELGSQILKEHPVENTQLQNEKLYLYYLQNGRDMYVDQELDINRLS | |
| | DYDVDHIVPQSFLKDDSIDNKVLTRSDKNRGKSDNVPSEEVVKKMKNYWRQLLNA | |
| | KLITQRKFDNLTKAERGGLSELDKAGFIKRQLVETRQITKHVAQILDSRMNTKYD | |
| | ENDKLIREVKVITLKSKLVSDFRKDFQFYKVREINNYHHAHDAYLNAVVGTALIK | |
| | KYPKLESEFVYG | |
| CP1028 | EIGKATAKYFFYSNIMNFFKTEITLANGEIRKRPLIETNGETGEIVWDKGRDFAT | SEQ ID NO: 65 |
| | VRKVLSMPQVNIVKKTEVQTGGFSKESILPKRNSDKLIARKKDWDPKKYGGFDSP | |
| | TVAYSVLVVAKVEKGKSKKLKSVKELLGITIMERSSFEKNPIDFLEAKGYKEVKK | |
| | DLIIKLPKYSLFELENGRKRMLASAGELQKGNELALPSKYVNFLYLASHYEKLKG | |
| | SPEDNEQKQLFVEQHKHYLDEIIEQISEFSKRVILADANLDKVLSAYNKHRDKPI | |
| | REQAENIIHLFTLTNLGAPAAFKYFDTTIDRKRYTSTKEVLDATLIHQSITGLYE | |
| | TRIDLSQLGGDGGSGGSGGSGGSGGSGGSGGMDKKYSIGLAIGTNSVGWAVITDE | |
| | YKVPSKKFKVLGNTDRHSIKKNLIGALLFDSGETAEATRLKRTARRRYTRRKNRI | |
| | CYLQEIFSNEMAKVDDSFFHRLEESFLVEEDKKHERHPIFGNIVDEVAYHEKYPT | |
| | IYHLRKKLVDSTDKADLRLIYLALAHMIKFRGHFLIEGDLNPDNSDVDKLFIQLV | |
| | QTYNQLFEENPINASGVDAKAILSARLSKSRRLENLIAQLPGEKKNGLFGNLIAL | |
| | SLGLTPNFKSNFDLAEDAKLQLSKDTYDDDLDNLLAQIGDQYADLFLAAKNLSDA | |
| | ILLSDILRVNTEITKAPLSASMIKRYDEHHQDLTLLKALVRQQLPEKYKEIFFDQ | |
| | SKNGYAGYIDGGASQEEFYKFIKPILEKMDGTEELLVKLNREDLLRKQRTFDNGS | |
| | IPHQIHLGELHAILRRQEDFYPFLKDNREKIEKILTFRIPYYVGPLARGNSRFAW | |
| | MTRKSEETITPWNFEEVVDKGASAQSFIERMTNFDKNLPNEKVLPKHSLLYEYFT | |
| | VYNELTKVKYVTEGMRKPAFLSGEQKKAIVDLLFKTNRKVTVKQLKEDYFKKIEC | |
| | FDSVEISGVEDRFNASLGTYHDLLKIIKDKDFLDNEENEDILEDIVLTLTLFEDR | |
| | EMIEERLKTYAHLFDDKVMKQLKRRRYTGWGRLSRKLINGIRDKQSGKTILDFLK | |
| | SDGFANRNFMQLIHDDSLTFKEDIQKAQVSGQGDSLHEHIANLAGSPAIKKGILQ | |
| | TVKVVDELVKVMGRHKPENIVIEMARENQTTQKGQKNSRERMKRIEEGIKELGSQ | |
| | ILKEHPVENTQLQNEKLYLYYLQNGRDMYVDQELDINRLSDYDVDHIVPQSFLKD | |
| | DSIDNKVLTRSDKNRGKSDNVPSEEVVKKMKNYWRQLLNAKLITQRKFDNLTKAE | |
| | RGGLSELDKAGFIKRQLVETRQITKHVAQILDSRMNTKYDENDKLIREVKVITLK | |
| | SKLVSDFRKDFQFYKVREINNYHHAHDAYLNAVVGTALIKKYPKLESEFVYGDYK | |
| | VYDVRKMIAKSEQ | |
| CP1041 | NIMNFFKTEITLANGEIRKRPLIETNGETGEIVWDKGRDFATVRKVLSMPQVNIV | SEQ ID NO: 66 |
| | KKTEVQTGGFSKESILPKRNSDKLIARKKDWDPKKYGGFDSPTVAYSVLVVAKVE | |
| | KGKSKKLKSVKELLGITIMERSSFEKNPIDFLEAKGYKEVKKDLIIKLPKYSLFE | |
| | LENGRKRMLASAGELQKGNELALPSKYVNFLYLASHYEKLKGSPEDNEQKQLFVE | |
| | QHKHYLDEIIEQISEFSKRVILADANLDKVLSAYNKHRDKPIREQAENIIHLFTL | |
| | TNLGAPAAFKYFDTTIDRKRYTSTKEVLDATLIHQSITGLYETRIDLSQLGGDGG | |
| | SGGSGGSGGSGGSGGSGGDKKYSIGLAIGTNSVGWAVITDEYKVPSKKFKVLGNT | |
| | DRHSIKKNLIGALLFDSGETAEATRLKRTARRRYTRRKNRICYLQEIFSNEMAKV | |
| | DDSFFHRLEESFLVEEDKKHERHPIFGNIVDEVAYHEKYPTIYHLRKKLVDSTDK | |
| | ADLRLIYLALAHMIKFRGHFLIEGDLNPDNSDVDKLFIQLVQTYNQLFEENPINA | |
| | SGVDAKAILSARLSKSRRLENLIAQLPGEKKNGLFGNLIALSLGLTPNFKSNFDL | |
| | AEDAKLQLSKDTYDDDLDNLLAQIGDQYADLFLAAKNLSDAILLSDILRVNTEIT | |
| | KAPLSASMIKRYDEHHQDLTLLKALVRQQLPEKYKEIFFDQSKNGYAGYIDGGAS | |
| | QEEFYKFIKPILEKMDGTEELLVKLNREDLLRKQRTFDNGSIPHQIHLGELHAIL | |
| | RRQEDFYPFLKDNREKIEKILTFRIPYYVGPLARGNSRFAWMTRKSEETITPWNF | |
| | EEVVDKGASAQSFIERMTNFDKNLPNEKVLPKHSLLYEYFTVYNELTKVKYVTEG | |
| | MRKPAFLSGEQKKAIVDLLFKTNRKVTVKQLKEDYFKKIECFDSVEISGVEDRFN | |
| | ASLGTYHDLLKIIKDKDFLDNEENEDILEDIVLTLTLFEDREMIEERLKTYAHLF | |
| | DDKVMKQLKRRRYTGWGRLSRKLINGIRDKQSGKTILDFLKSDGFANRNFMQLIH | |
| | DDSLTFKEDIQKAQVSGQGDSLHEHIANLAGSPAIKKGILQTVKVVDELVKVMGR | |
| | HKPENIVIEMARENQTTQKGQKNSRERMKRIEEGIKELGSQILKEHPVENTQLQN | |
| | EKLYLYYLQNGRDMYVDQELDINRLSDYDVDHIVPQSFLKDDSIDNKVLTRSDKN | |
| | RGKSDNVPSEEVVKKMKNYWRQLLNAKLITQRKFDNLTKAERGGLSELDKAGFIK | |
| | RQLVETRQITKHVAQILDSRMNTKYDENDKLIREVKVITLKSKLVSDFRKDFQFY | |
| | KVREINNYHHAHDAYLNAVVGTALIKKYPKLESEFVYGDYKVYDVRKMIAKSEQE | |
| | IGKATAKYFFYS | |
| CP1249 | PEDNEQKQLFVEQHKHYLDEIIEQISEFSKRVILADANLDKVLSAYNKHRDKPIR | SEQ ID NO: 67 |
| | EQAENIIHLFTLTNLGAPAAFKYFDTTIDRKRYTSTKEVLDATLIHQSITGLYET | |
| | RIDLSQLGGDGGSGGSGGSGGSGGSGGSGGMDKKYSIGLAIGTNSVGWAVITDEY | |
| | KVPSKKFKVLGNTDRHSIKKNLIGALLFDSGETAEATRLKRTARRRYTRRKNRIC | |
| | YLQEIFSNEMAKVDDSFFHRLEESFLVEEDKKHERHPIFGNIVDEVAYHEKYPTI | |
| | YHLRKKLVDSTDKADLRLIYLALAHMIKFRGHFLIEGDLNPDNSDVDKLFIQLVQ | |
| | TYNQLFEENPINASGVDAKAILSARLSKSRRLENLIAQLPGEKKNGLFGNLIALS | |
| | LGLTPNFKSNFDLAEDAKLQLSKDTYDDDLDNLLAQIGDQYADLFLAAKNLSDAI | |
| | LLSDILRVNTEITKAPLSASMIKRYDEHHQDLTLLKALVRQQLPEKYKEIFFDQS | |
| | KNGYAGYIDGGASQEEFYKFIKPILEKMDGTEELLVKLNREDLLRKQRTFDNGSI | |
| | PHQIHLGELHAILRRQEDFYPFLKDNREKIEKILTFRIPYYVGPLARGNSRFAWM | |
| | TRKSEETITPWNFEEVVDKGASAQSFIERMTNFDKNLPNEKVLPKHSLLYEYFTV | |
| | YNELTKVKYVTEGMRKPAFLSGEQKKAIVDLLFKTNRKVTVKQLKEDYFKKIECF | |
| | DSVEISGVEDRFNASLGTYHDLLKIIKDKDFLDNEENEDILEDIVLTLTLFEDRE | |
| | MIEERLKTYAHLFDDKVMKQLKRRRYTGWGRLSRKLINGIRDKQSGKTILDFLKS | |
| | DGFANRNFMQLIHDDSLTFKEDIQKAQVSGQGDSLHEHIANLAGSPAIKKGILQT | |
| | VKVVDELVKVMGRHKPENIVIEMARENQTTQKGQKNSRERMKRIEEGIKELGSQI | |
| | LKEHPVENTQLQNEKLYLYYLQNGRDMYVDQELDINRLSDYDVDHIVPQSFLKDD | |
| | SIDNKVLTRSDKNRGKSDNVPSEEVVKKMKNYWRQLLNAKLITQRKFDNLTKAER | |
| | GGLSELDKAGFIKRQLVETRQITKHVAQILDSRMNTKYDENDKLIREVKVITLKS | |
| | KLVSDFRKDFQFYKVREINNYHHAHDAYLNAVVGTALIKKYPKLESEFVYGDYKV | |
| | YDVRKMIAKSEQEIGKATAKYFFYSNIMNFFKTEITLANGEIRKRPLIETNGETG | |
| | EIVWDKGRDFATVRKVLSMPQVNIVKKTEVQTGGFSKESILPKRNSDKLIARKKD | |
| | WDPKKYGGFDSPTVAYSVLVVAKVEKGKSKKLKSVKELLGITIMERSSFEKNPID | |
| | FLEAKGYKEVKKDLIIKLPKYSLFELENGRKRMLASAGELQKGNELALPSKYVNF | |
| | LYLASHYEKLKGS | |
| CP1300 | KPIREQAENIIHLFTLTNLGAPAAFKYFDTTIDRKRYTSTKEVLDATLIHQSITG | SEQ ID NO: 68 |
| | LYETRIDLSQLGGDGGSGGSGGSGGSGGSGGSGGDKKYSIGLAIGTNSVGWAVIT | |
| | DEYKVPSKKFKVLGNTDRHSIKKNLIGALLFDSGETAEATRLKRTARRRYTRRKN | |
| | RICYLQEIFSNEMAKVDDSFFHRLEESFLVEEDKKHERHPIFGNIVDEVAYHEKY | |
| | PTIYHLRKKLVDSTDKADLRLIYLALAHMIKFRGHFLIEGDLNPDNSDVDKLFIQ | |
| | LVQTYNQLFEENPINASGVDAKAILSARLSKSRRLENLIAQLPGEKKNGLFGNLI | |
| | ALSLGLTPNFKSNFDLAEDAKLQLSKDTYDDDLDNLLAQIGDQYADLFLAAKNLS | |
| | DAILLSDILRVNTEITKAPLSASMIKRYDEHHQDLTLLKALVRQQLPEKYKEIFF | |
| | DQSKNGYAGYIDGGASQEEFYKFIKPILEKMDGTEELLVKLNREDLLRKQRTFDN | |
| | GSIPHQIHLGELHAILRRQEDFYPFLKDNREKIEKILTFRIPYYVGPLARGNSRF | |
| | AWMTRKSEETITPWNFEEVVDKGASAQSFIERMTNFDKNLPNEKVLPKHSLLYEY | |
| | FTVYNELTKVKYVTEGMRKPAFLSGEQKKAIVDLLFKTNRKVTVKQLKEDYFKKI | |
| | ECFDSVEISGVEDRFNASLGTYHDLLKIIKDKDFLDNEENEDILEDIVLTLTLFE | |
| | DREMIEERLKTYAHLFDDKVMKQLKRRRYTGWGRLSRKLINGIRDKQSGKTILDF | |
| | LKSDGFANRNFMQLIHDDSLTFKEDIQKAQVSGQGDSLHEHIANLAGSPAIKKGI | |
| | LQTVKVVDELVKVMGRHKPENIVIEMARENQTTQKGQKNSRERMKRIEEGIKELG | |
| | SQILKEHPVENTQLQNEKLYLYYLQNGRDMYVDQELDINRLSDYDVDHIVPQSFL | |
| | KDDSIDNKVLTRSDKNRGKSDNVPSEEVVKKMKNYWRQLLNAKLITQRKFDNLTK | |
| | AERGGLSELDKAGFIKRQLVETRQITKHVAQILDSRMNTKYDENDKLIREVKVIT | |
| | LKSKLVSDFRKDFQFYKVREINNYHHAHDAYLNAVVGTALIKKYPKLESEFVYGD | |
| | YKVYDVRKMIAKSEQEIGKATAKYFFYSNIMNFFKTEITLANGEIRKRPLIETNG | |
| | ETGEIVWDKGRDFATVRKVLSMPQVNIVKKTEVQTGGFSKESILPKRNSDKLIAR | |
| | KKDWDPKKYGGFDSPTVAYSVLVVAKVEKGKSKKLKSVKELLGITIMERSSFEKN | |
| | PIDFLEAKGYKEVKKDLIIKLPKYSLFELENGRKRMLASAGELQKGNELALPSKY | |
| | VNFLYLASHYEKLKGSPEDNEQKQLFVEQHKHYLDEIIEQISEFSKRVILADANL | |
| | DKVLSAYNKHRD | |

[0463] The Cas9 circular permutants that may be useful in the base editing constructs described herein. Exemplary C-terminal fragments of Cas9, based on the Cas9 of SEQ TD NO: 5, which may be rearranged to an N-terminus of Cas9, are provided below. It should be appreciated that such C-terminal fragments of Cas9 are exemplary and are not meant to be limiting. These exemplary CP-Cas9 fragments have the following sequences:

| CP name | Sequence | SEQ ID NO: |
|---|---|---|
| CP1012 c- | DYKVYDVRKMIAKSEQEIGKATAKYFFYSNIMNFFKTEITLANGEIRKRPLIETN | 69 |
| terminal | GETGEIVWDKGRDFATVRKVLSMPQVNIVKKTEVQTGGFSKESILPKRNSDKLIA | |
| fragment | RKKDWDPKKYGGFDSPTVAYSVLVVAKVEKGKSKKLKSVKELLGITIMERSSFEK | |
| | NPIDFLEAKGYKEVKKDLIIKLPKYSLFELENGRKRMLASAGELQKGNELALPSK | |
| | YVNFLYLASHYEKLKGSPEDNEQKQLFVEQHKHYLDEIIEQISEFSKRVILADAN | |
| | LDKVLSAYNKHRDKPIREQAENIIHLFTLTNLGAPAAFKYFDTTIDRKRYTSTKE | |
| | VLDATLIHQSITGLYETRIDLSQLGGD | |
| CP1028 c- | EIGKATAKYFFYSNIMNFFKTEITLANGEIRKRPLIETNGETGEIVWDKGRDFAT | 70 |
| terminal | VRKVLSMPQVNIVKKTEVQTGGFSKESILPKRNSDKLIARKKDWDPKKYGGFDSP | |
| fragment | TVAYSVLVVAKVEKGKSKKLKSVKELLGITIMERSSFEKNPIDFLEAKGYKEVKK | |
| | DLIIKLPKYSLFELENGRKRMLASAGELQKGNELALPSKYVNFLYLASHYEKLKG | |
| | SPEDNEQKQLFVEQHKHYLDEIIEQISEFSKRVILADANLDKVLSAYNKHRDKPI | |
| | REQAENIIHLFTLTNLGAPAAFKYFDTTIDRKRYTSTKEVLDATLIHQSITGLYE | |
| | TRIDLSQLGGD | |
| CP1041 c- | NIMNFFKTEITLANGEIRKRPLIETNGETGEIVWDKGRDFATVRKVLSMPQVNIV | 71 |
| terminal | KKTEVQTGGFSKESILPKRNSDKLIARKKDWDPKKYGGFDSPTVAYSVLVVAKVE | |
| fragment | KGKSKKLKSVKELLGITIMERSSFEKNPIDFLEAKGYKEVKKDLIIKLPKYSLFE | |
| | LENGRKRMLASAGELQKGNELALPSKYVNFLYLASHYEKLKGSPEDNEQKQLFVE | |
| | QHKHYLDEIIEQISEFSKRVILADANLDKVLSAYNKHRDKPIREQAENIIHLFTL | |
| | TNLGAPAAFKYFDTTIDRKRYTSTKEVLDATLIHQSITGLYETRIDLSQLGGD | |
| CP1249 c- | PEDNEQKQLFVEQHKHYLDEIIEQISEFSKRVILADANLDKVLSAYNKHRDKPIR | 72 |
| terminal | EQAENIIHLFTLTNLGAPAAFKYFDTTIDRKRYTSTKEVLDATLIHQSITGLYET | |
| fragment | RIDLSQLGGD | |
| CP1300 c- | KPIREQAENIIHLFTLTNLGAPAAFKYFDTTIDRKRYTSTKEVLDATLIHQSITG | 73 |
| terminal | LYETRIDLSQLGGD | |
| fragment | | |

[0464] (10) Cas9 Variants with Modified PAM Specificities

[0465] The base editors of the present disclosure may also comprise Cas9 variants with modified PAM specificities. For example, the base editors described herein may utilize any naturally occurring or engineered variant of SpCas9 having expanded and/or relaxed PAM specificities which are described in the literature, including in Nishimasu et al., “Engineered CRISPR-Cas9 nuclease with expanded targeting space,” Science, 2018, 361: 1259-1262; Chatterjee et al., “Robust Genome Editing of Single-Base PAM Targets with Engineered ScCas9 Variants,” BioRxiv, Apr. 26, 2019 Some aspects of this disclosure provide Cas9 proteins that exhibit activity on a target sequence that does not comprise the canonical PAM (5′-NGG-3′, where N is A, C, G, or T) at its 3′-end. In some embodiments, the Cas9 protein exhibits activity on a target sequence comprising a 5′-NGG-3′ PAM sequence at its 3′-end. In some embodiments, the Cas9 protein exhibits activity on a target sequence comprising a 5′-NNG-3′ PAM sequence at its 3′-end. In some embodiments, the Cas9 protein exhibits activity on a target sequence comprising a 5′-NNA-3′ PAM sequence at its 3′-end. In some embodiments, the Cas9 protein exhibits activity on a target sequence comprising a 5′-NNC-3′ PAM sequence at its 3′-end. In some embodiments, the Cas9 protein exhibits activity on a target sequence comprising a 5′-NNT-3′ PAM sequence at its 3′-end. In some embodiments, the Cas9 protein exhibits activity on a target sequence comprising a 5′-NGT-3′ PAM sequence at its 3′-end. In some embodiments, the Cas9 protein exhibits activity on a target sequence comprising a 5′-NGA-3′ PAM sequence at its 3′-end. In some embodiments, the Cas9 protein exhibits activity on a target sequence comprising a 5′-NGC-3′ PAM sequence at its 3′-end. In some embodiments, the Cas9 protein exhibits activity on a target sequence comprising a 5′-NAA-3′ PAM sequence at its 3′-end. In some embodiments, the Cas9 protein exhibits activity on a target sequence comprising a 5′-NAC-3′ PAM sequence at its 3′-end. In some embodiments, the Cas9 protein exhibits activity on a target sequence comprising a 5′-NAT-3′ PAM sequence at its 3′-end. In still other embodiments, the Cas9 protein exhibits activity on a target sequence comprising a 5′-NAG-3′ PAM sequence at its 3′-end.

[0466] It should be appreciated that any of the amino acid mutations described herein, (e.g., A262T) from a first amino acid residue (e.g., A) to a second amino acid residue (e.g., T) may also include mutations from the first amino acid residue to an amino acid residue that is similar to (e.g., conserved) the second amino acid residue. For example, mutation of an amino acid with a hydrophobic side chain (e.g., alanine, valine, isoleucine, leucine, methionine, phenylalanine, tyrosine, or tryptophan) may be a mutation to a second amino acid with a different hydrophobic side chain (e.g., alanine, valine, isoleucine, leucine, methionine, phenylalanine, tyrosine, or tryptophan). For example, a mutation of an alanine to a threonine (e.g., a A262T mutation) may also be a mutation from an alanine to an amino acid that is similar in size and chemical properties to a threonine, for example, serine. As another example, mutation of an amino acid with a positively charged side chain (e.g., arginine, histidine, or lysine) may be a mutation to a second amino acid with a different positively charged side chain (e.g., arginine, histidine, or lysine). As another example, mutation of an amino acid with a polar side chain (e.g., serine, threonine, asparagine, or glutamine) may be a mutation to a second amino acid with a different polar side chain (e.g., serine, threonine, asparagine, or glutamine). Additional similar amino acid pairs include, but are not limited to, the following: phenylalanine and tyrosine; asparagine and glutamine; methionine and cysteine; aspartic acid and glutamic acid; and arginine and lysine. The skilled artisan would recognize that such conservative amino acid substitutions will likely have minor effects on protein structure and are likely to be well tolerated without compromising function. In some embodiments, any amino of the amino acid mutations provided herein from one amino acid to a threonine may be an amino acid mutation to a serine. In some embodiments, any amino of the amino acid mutations provided herein from one amino acid to an arginine may be an amino acid mutation to a lysine. In some embodiments, any amino of the amino acid mutations provided herein from one amino acid to an isoleucine, may be an amino acid mutation to an alanine, valine, methionine, or leucine. In some embodiments, any amino of the amino acid mutations provided herein from one amino acid to a lysine may be an amino acid mutation to an arginine. In some embodiments, any amino of the amino acid mutations provided herein from one amino acid to an aspartic acid may be an amino acid mutation to a glutamic acid or asparagine. In some embodiments, any amino of the amino acid mutations provided herein from one amino acid to a valine may be an amino acid mutation to an alanine, isoleucine, methionine, or leucine. In some embodiments, any amino of the amino acid mutations provided herein from one amino acid to a glycine may be an amino acid mutation to an alanine. It should be appreciated, however, that additional conserved amino acid residues would be recognized by the skilled artisan and any of the amino acid mutations to other conserved amino acid residues are also within the scope of this disclosure.

[0467] In some embodiments, the present disclosure may utilize any of the Cas9 variants disclosed in the SEQUENCES section herein.

[0468] In some embodiments, the Cas9 protein comprises a combination of mutations that exhibit activity on a target sequence comprising a 5′-NAA-3′ PAM sequence at its 3′-end. In some embodiments, the combination of mutations are present in any one of the clones listed in Table 1. In some embodiments, the combination of mutations are conservative mutations of the clones listed in Table 1. In some embodiments, the Cas9 protein comprises the combination of mutations of any one of the Cas9 clones listed in Table 1.

TABLE 1
NAA PAM Clones
Mutations from wild-type SpCas9 (e.g., SEQ ID NO: 5)

D177N, K218R, D614N, D1135N, P1137S, E1219V, A1320V, A1323D, R1333K
D177N, K218R, D614N, D1135N, E1219V, Q1221H, H1264Y, A1320V, R1333K
A10T, I322V, S409I, E427G, G715C, D1135N, E1219V, Q1221H, H1264Y, A1320V, R1333K
A367T, K710E, R1114G, D1135N, P1137S, E1219V, Q1221H, H1264Y, A1320V, R1333K
A10T, I322V, S409I, E427G, R753G, D861N, D1135N, K1188R, E1219V, Q1221H, H1264H,
A1320V, R1333K
A10T, I322V, S409I, E427G, R654L, V743I, R753G, M1021T, D1135N, D1180G, K1211R,
E1219V, Q1221H, H1264Y, A1320V, R1333K
A10T, I322V, S409I, E427G, V743I, R753G, E762G, D1135N, D1180G, K1211R, E1219V,
Q1221H, H1264Y, A1320V, R1333K
A10T, I322V, S409I, E427G, R753G, D1135N, D1180G, K1211R, E1219V, Q1221H, H1264Y,
S1274R, A1320V, R1333K
A10T, I322V, S409I, E427G, A589S, R753G, D1135N, E1219V, Q1221H, H1264H, A1320V,
R1333K
A10T, I322V, S409I, E427G, R753G, E757K, G865G, D1135N, E1219V, Q1221H, H1264Y,
A1320V, R1333K
A10T, I322V, S409I, E427G, R654L, R753G, E757K, D1135N, E1219V, Q1221H, H1264Y,
A1320V, R1333K
A10T, I322V, S409I, E427G, K599R, M631A, R654L, K673E, V743I, R753G, N758H, E762G,
D1135N, D1180G, E1219V, Q1221H, Q1256R, H1264Y, A1320V, A1323D, R1333K
A10T, I322V, S409I, E427G, R654L, K673E, V743I, R753G, E762G, N869S, N1054D, R1114G,
D1135N, D1180G, E1219V, Q1221H, H1264Y, A1320V, A1323D, R1333K
A10T, I322V, S409I, E427G, R654L, L727I, V743I, R753G, E762G, R859S, N946D, F1134L,
D1135N, D1180G, E1219V, Q1221H, H1264Y, N1317T, A1320V, A1323D, R1333K
A10T, I322V, S409I, E427G, R654L, K673E, V743I, R753G, E762G, N803S, N869S, Y1016D,
G1077D, R1114G, F1134L, D1135N, D1180G, E1219V, Q1221H, H1264Y, V1290G, L1318S,
A1320V, A1323D, R1333K
A10T, I322V, S409I, E427G, R654L, K673E, V743I, R753G, E762G, N803S, N869S, Y1016D,
G1077D, R1114G, F1134L, D1135N, K1151E, D1180G, E1219V, Q1221H, H1264Y, V1290G,
L1318S, A1320V, R1333K
A10T, I322V, S409I, E427G, R654L, K673E, V743I, R753G, E762G, N803S, N869S, Y1016D,
G1077D, R1114G, F1134L, D1135N, D1180G, E1219V, Q1221H, H1264Y, V1290G, L1318S,
A1320V, A1323D, R1333K
A10T, I322V, S409I, E427G, R654L, K673E, F693L, V743I, R753G, E762G, N803S, N869S,
L921P, Y1016D, G1077D, F1080S, R1114G, D1135N, D1180G, E1219V, Q1221H, H1264Y,
L1318S, A1320V, A1323D, R1333K
A10T, I322V, S409I, E427G, E630K, R654L, K673E, V743I, R753G, E762G, Q768H, N803S,
N869S, Y1016D, G1077D, R1114G, F1134L, D1135N, D1180G, E1219V, Q1221H, H1264Y,
L1318S, A1320V, R1333K
A10T, I322V, S409I, E427G, R654L, K673E, F693L, V743I, R753G, E762G, Q768H, N803S,
N869S, Y1016D, G1077D, R1114G, F1134L, D1135N, D1180G, E1219V, Q1221H, G1223S,
H1264Y, L1318S, A1320V, R1333K
A10T, I322V, S409I, E427G, R654L, K673E, F693L, V743I, R753G, E762G, N803S, N869S,
L921P, Y1016D, G1077D, F1801S, R1114G, D1135N, D1180G, E1219V, Q1221H, H1264Y,
L1318S, A1320V, A1323D, R1333K
A10T, I322V, S409I, E427G, R654L, V743I, R753G, M1021T, D1135N, D1180G, K1211R,
E1219V, Q1221H, H1264Y, A1320V, R1333K
A10T, I322V, S409I, E427G, R654L, K673E, V743I, R753G, E762G, M673I, N803S, N869S,
G1077D, R1114G, D1135N, V1139A, D1180G, E1219V, Q1221H, A1320V, R1333K
A10T, I322V, S409I, E427G, R654L, K673E, V743I, R753G, E762G, N803S, N869S, R1114G,
D1135N, E1219V, Q1221H, A1320V, R1333K

[0469] In some embodiments, the Cas9 protein comprises an amino acid sequence that is at least 80% identical to the amino acid sequence of a Cas9 protein as provided by any one of the variants of Table 1. In some embodiments, the Cas9 protein comprises an amino acid sequence that is at least 85%, at least 90%, at least 92%, at least 95%, at least 96%, at least 97%, at least 98%, at least 99%, or at least 99.5% identical to the amino acid sequence of a Cas9 protein as provided by any one of the variants of Table 1.

[0470] In some embodiments, the Cas9 protein exhibits an increased activity on a target sequence that does not comprise the canonical PAM (5′-NGG-3′) at its 3′ end as compared to Streptococcus pyogenes Cas9 as provided by SEQ ID NO: 5. In some embodiments, the Cas9 protein exhibits an activity on a target sequence having a 3′ end that is not directly adjacent to the canonical PAM sequence (5′-NGG-3′) that is at least 5-fold increased as compared to the activity of Streptococcus pyogenes Cas9 as provided by SEQ ID NO: 5 on the same target sequence. In some embodiments, the Cas9 protein exhibits an activity on a target sequence that is not directly adjacent to the canonical PAM sequence (5′-NGG-3′) that is at least 10-fold, at least 50-fold, at least 100-fold, at least 500-fold, at least 1,000-fold, at least 5,000-fold, at least 10,000-fold, at least 50,000-fold, at least 100,000-fold, at least 500,000-fold, or at least 1,000,000-fold increased as compared to the activity of Streptococcus pyogenes as provided by SEQ ID NO: 5 on the same target sequence. In some embodiments, the 3′ end of the target sequence is directly adjacent to an AAA, GAA, CAA, or TAA sequence. In some embodiments, the Cas9 protein comprises a combination of mutations that exhibit activity on a target sequence comprising a 5′-NAC-3′ PAM sequence at its 3′-end. In some embodiments, the combination of mutations are present in any one of the clones listed in Table 2. In some embodiments, the combination of mutations are conservative mutations of the clones listed in Table 2. In some embodiments, the Cas9 protein comprises the combination of mutations of any one of the Cas9 clones listed in Table 2.

TABLE 2
NAC PAM Clones
MUTATIONS FROM WILD-TYPE SPCAS9 (E.G., SEQ ID NO: 5)

T472I, R753G, K890E, D1332N, R1335Q, T1337N
I1057S, D1135N, P1301S, R1335Q, T1337N
T472I, R753G, D1332N, R1335Q, T1337N
D1135N, E1219V, D1332N, R1335Q, T1337N
T472I, R753G, K890E, D1332N, R1335Q, T1337N
I1057S, D1135N, P1301S, R1335Q, T1337N
T472I, R753G, D1332N, R1335Q, T1337N
T472I, R753G, Q771H, D1332N, R1335Q, T1337N
E627K, T638P, K652T, R753G, N803S, K959N, R1114G, D1135N, E1219V, D1332N, R1335Q,
T1337N
E627K, T638P, K652T, R753G, N803S, K959N, R1114G, D1135N, K1156E, E1219V, D1332N,
R1335Q, T1337N
E627K, T638P, V647I, R753G, N803S, K959N, G1030R, I1055E, R1114G, D1135N, E1219V,
D1332N, R1335Q, T1337N
E627K, E630G, T638P, V647A, G687R, N767D, N803S, K959N, R1114G, D1135N, E1219V,
D1332G, R1335Q, T1337N
E627K, T638P, R753G, N803S, K959N, R1114G, D1135N, E1219V, N1266H, D1332N, R1335Q,
T1337N
E627K, T638P, R753G, N803S, K959N, I1057T, R1114G, D1135N, E1219V, D1332N, R1335Q,
T1337N
E627K, T638P, R753G, N803S, K959N, R1114G, D1135N, E1219V, D1332N, R1335Q, T1337N
E627K, M631I, T638P, R753G, N803S, K959N, Y1036H, R1114G, D1135N, E1219V, D1251G,
D1332G, R1335Q, T1337N
E627K, T638P, R753G, N803S, V875I, K959N, Y1016C, R1114G, D1135N, E1219V, D1251G,
D1332G, R1335Q, T1337N, I1348V
K608R, E627K, T638P, V647I, R654L, R753G, N803S, T804A, K848N, V922A, K959N, R1114G,
D1135N, E1219V, D1332N, R1335Q, T1337N
K608R, E627K, T638P, V647I, R753G, N803S, V922A, K959N, K1014N, V1015A, R1114G,
D1135N, K1156N, E1219V, N1252D, D1332N, R1335Q, T1337N
K608R, E627K, R629G, T638P, V647I, A711T, R753G, K775R, K789E, N803S, K959N, V1015A,
Y1036H, R1114G, D1135N, E1219V, N1286H, D1332N, R1335Q, T1337N
K608R, E627K, T638P, V647I, T740A, R753G, N803S, K948E, K959N, Y1016S, R1114G,
D1135N, E1219V, N1286H, D1332N, R1335Q, T1337N
K608R, E627K, T638P, V647I, T740A, N803S, K948E, K959N, Y1016S, R1114G, D1135N,
E1219V, N1286H, D1332N, R1335Q, T1337N
I670S, K608R, E627K, E630G, T638P, V647I, R653K, R753G, I795L, K797N, N803S, K866R,
K890N, K959N, Y1016C, R1114G, D1135N, E1219V, D1332N, R1335Q, T1337N
K608R, E627K, T638P, V647I, T740A, G752R, R753G, K797N, N803S, K948E, K959N, V1015A,
Y1016S, R1114G, D1135N, E1219V, N1266H, D1332N, R1335Q, T1337N
I570T, A589V, K608R, E627K, T638P, V647I, R654L, Q716R, R753G, N803S, K948E, K959N,
Y1016S, R1114G, D1135N, E1207G, E1219V, N1234D, D1332N, R1335Q, T1337N
K608R, E627K, R629G, T638P, V647I, R654L, Q740R, R753G, N803S, K959N, N990S, T995S,
V1015A, Y1036D, R1114G, D1135N, E1207G, E1219V, N1234D, N1266H, D1332N, R1335Q,
T1337N
I562F, V565D, I570T, K608R, L625S, E627K, T638P, V647I, R654I, G752R, R753G, N803S,
N808D, K959N, M1021L, R1114G, D1135N, N1177S, N1234D, D1332N, R1335Q, T1337N
I562F, I570T, K608R, E627K, T638P, V647I, R753G, E790A, N803S, K959N, V1015A, Y1036H,
R1114G, D1135N, D1180E, A1184T, E1219V, D1332N, R1335Q, T1337N
I570T, K608R, E627K, T638P, V647I, R654H, R753G, E790A, N803S, K959N, V1015A, R1114G,
D1127A, D1135N, E1219V, D1332N, R1335Q, T1337N
I570T, K608R, L625S, E627K, T638P, V647I, R654I, T703P, R753G, N803S, N808D, K959N,
M1021L, R1114G, D1135N, E1219V, D1332N, R1335Q, T1337N
I570S, K608R, E627K, E630G, T638P, V647I, R653K, R753G, I795L, N803S, K866R, K890N,
K959N, Y1016C, R1114G, D1135N, E1219V, D1332N, R1335Q, T1337N
I570T, K608R, E627K, T638P, V647I, R654H, R753G, E790A, N803S, K959N, V1016A, R1114G,
D1135N, E1219V, K1246E, D1332N, R1335Q, T1337N
K608R, E627K, T638P, V647I, R654L, K673E, R753G, E790A, N803S, K948E, K959N, R1114G,
D1127G, D1135N, D1180E, E1219V, N1286H, D1332N, R1335Q, T1337N
K608R, L625S, E627K, T638P, V647I, R654I, I670T, R753G, N803S, N808D, K959N, M1021L,
R1114G, D1135N, E1219V, N1286H, D1332N, R1335Q, T1337N
E627K, M631V, T638P, V647I, K710E, R753G, N803S, N808D, K948E, M1021L, R1114G,
D1135N, E1219V, D1332N, R1335Q, T1337N, S1338T, H1349R

[0471] In some embodiments, the Cas9 protein comprises an amino acid sequence that is at least 80% identical to the amino acid sequence of a Cas9 protein as provided by any one of the variants of Table 2. In some embodiments, the Cas9 protein comprises an amino acid sequence that is at least 85%, at least 90%, at least 92%, at least 95%, at least 96%, at least 97%, at least 98%, at least 99%, or at least 99.5% identical to the amino acid sequence of a Cas9 protein as provided by any one of the variants of Table 2.

[0472] In some embodiments, the Cas9 protein exhibits an increased activity on a target sequence that does not comprise the canonical PAM (5′-NGG-3′) at its 3′ end as compared to Streptococcus pyogenes Cas9 as provided by SEQ ID NO: 5. In some embodiments, the Cas9 protein exhibits an activity on a target sequence having a 3′ end that is not directly adjacent to the canonical PAM sequence (5′-NGG-3′) that is at least 5-fold increased as compared to the activity of Streptococcus pyogenes Cas9 as provided by SEQ ID NO: 5 on the same target sequence. In some embodiments, the Cas9 protein exhibits an activity on a target sequence that is not directly adjacent to the canonical PAM sequence (5′-NGG-3′) that is at least 10-fold, at least 50-fold, at least 100-fold, at least 500-fold, at least 1,000-fold, at least 5,000-fold, at least 10,000-fold, at least 50,000-fold, at least 100,000-fold, at least 500,000-fold, or at least 1,000,000-fold increased as compared to the activity of Streptococcus pyogenes as provided by SEQ ID NO: 5 on the same target sequence. In some embodiments, the 3′ end of the target sequence is directly adjacent to an AAC, GAC, CAC, or TAC sequence.

[0473] In some embodiments, the Cas9 protein comprises a combination of mutations that exhibit activity on a target sequence comprising a 5′-NAT-3′ PAM sequence at its 3′-end. In some embodiments, the combination of mutations are present in any one of the clones listed in Table 3. In some embodiments, the combination of mutations are conservative mutations of the clones listed in Table 3. In some embodiments, the Cas9 protein comprises the combination of mutations of any one of the Cas9 clones listed in Table 3.

TABLE 3
NAT PAM Clones
MUTATIONS FROM WILD-TYPE SPCAS9 (E.G., SEQ ID NO: 5)

K961E, H985Y, D1135N, K1191N, E1219V, Q1221H, A1320A, P1321S, R1335L
D1135N, G1218S, E1219V, Q1221H, P1249S, P1321S, D1322G, R1335L
V743I, R753G, E790A, D1135N, G1218S, E1219V, Q1221H, A1227V, P1249S, N1286K, A1293T,
P1321S, D1322G, R1335L, T1339I
F575S, M631L, R654L, V748I, V743I, R753G, D853E, V922A, R1114G D1135N, G1218S,
E1219V, Q1221H, A1227V, P1249S, N1286K, A1293T, P1321S, D1322G, R1335L, T1339I
F575S, M631L, R654L, R664K, R753G, D853E, V922A, R1114G D1135N, D1180G, G1218S,
E1219V, Q1221H, P1249S, N1286K, P1321S, D1322G, R1335L
M631L, R654L, R753G, K797E, D853E, V922A, D1012A, R1114G D1135N, G1218S, E1219V,
Q1221H, P1249S, N1317K, P1321S, D1322G, R1335L
F575S, M631L, R654L, R664K, R753G, D853E, V922A, R1114G, Y1131C, D1135N, D1180G,
G1218S, E1219V, Q1221H, P1249S, P1321S, D1322G, R1335L
F575S, M631L, R654L, R664K, R753G, D853E, V922A, R1114G, Y1131C, D1135N, D1180G,
G1218S, E1219V, Q1221H, P1249S, P1321S, D1322G, R1335L
F575S, D596Y, M631L, R654L, R664K, R753G, D853E, V922A, R1114G, Y1131C, D1135N,
D1180G, G1218S, E1219V, Q1221H, P1249S, Q1256R, P1321S, D1322G, R1335L
F575S, M631L, R654L, R664K, K710E, V750A, R753G, D853E, V922A, R1114G, Y1131C,
D1135N, D1180G, G1218S, E1219V, Q1221H, P1249S, P1321S, D1322G, R1335L
F575S, M631L, K649R, R654L, R664K, R753G, D853E, V922A, R1114G, Y1131C, D1135N,
K1156E, D1180G, G1218S, E1219V, Q1221H, P1249S, P1321S, D1322G, R1335L
F575S, M631L, R654L, R664K, R753G, D853E, V922A, R1114G, Y1131C, D1135N, D1180G,
G1218S, E1219V, Q1221H, P1249S, P1321S, D1322G, R1335L
F575S, M631L, R654L, R664K, R753G, D853E, V922A, I1057G, R1114G, Y1131C, D1135N,
D1180G, G1218S, E1219V, Q1221H, P1249S, N1308D, P1321S, D1322G, R1335L
M631L, R654L, R753G, D853E, V922A, R1114G, Y1131C, D1135N, E1150V, D1180G, G1218S,
E1219V, Q1221H, P1249S, P1321S, D1332G, R1335L
M631L, R654L, R664K, R753G, D853E, I1057V, Y1131C, D1135N, D1180G, G1218S, E1219V,
Q1221H, P1249S, P1321S, D1332G, R1335L
M631L, R654L, R664K, R753G, I1057V, R1114G, Y1131C, D1135N, D1180G, G1218S, E1219V,
Q1221H, P1249S, P1321S, D1332G, R1335L

(i) The above description of various napDNAbps which can be used in connection with the presently disclose base editors is not meant to be limiting in any way. The base editors may comprise the canonical SpCas9, or any ortholog Cas9 protein, or any variant Cas9 protein—including any naturally occurring variant, mutant, or otherwise engineered version of Cas9—that is known or which can be made or evolved through a directed evolutionary or otherwise mutagenic process. In various embodiments, the Cas9 or Cas9 variants have a nickase activity, i.e., only cleave of strand of the target DNA sequence. In other embodiments, the Cas9 or Cas9 variants have inactive nucleases, i.e., are “dead” Cas9 proteins. Other variant Cas9 proteins that may be used are those having a smaller molecular weight than the canonical SpCas9 (e.g., for easier delivery) or having modified or rearranged primary amino acid structure (e.g., the circular permutant formats). The base editors described herein may also comprise Cas9 equivalents, including Cas12a/Cpf1 and Cas12b proteins which are the result of convergent evolution. The napDNAbps used herein (e.g., SpCas9, Cas9 variant, or Cas9 equivalents) may also may also contain various modifications that alter/enhance their PAM specifities. Lastly, the application contemplates any Cas9, Cas9 variant, or Cas9 equivalent which has at least 70%, at least 75%, at least 80%, at least 85%, at least 90%, at least 91%, at least 92%, at least 93%, at least 94%, at least 95%, at least 96%, at least 97%, at least 98%, at least 99%, or at least 99.9% sequence identity to a reference Cas9 sequence, such as a references SpCas9 canonical sequences or a reference Cas9 equivalent (e.g., Cas12a/Cpf1).

[0474] In a particular embodiment, the Cas9 variant having expanded PAM capabilities is SpCas9 (H840A) VRQR, having the following amino acid sequence (with the V, R, Q, R substitutions relative to the SpCas9 (H840A) of SEQ ID NO: 42 show in bold underline. In addition, the methionine residue in SpCas9 (H840) was removed for SpCas9 (H840A) VRQR) (“SpCas9-VRQR”). This SpCas9 variant possesses an altered PAM-specificity which recognizes a PAM of 5′-NGA-3′ instead of the canonical PAM of 5′-NGG-3′:

SpCas9-VRQR
(SEQ ID NO: 74)
DKKYSIGLDIGTNSVGWAVITDEYKVPSKKFKVLGNTDRHSIKKNLIGALLFDSGETAEATRLKRTARRRYTRRKNRICYL
QEIFSNEMAKVDDSFFHRLEESFLVEEDKKHERHPIFGNIVDEVAYHEKYPTIYHLRKKLVDSTDKADLRLIYLALAHMIK
FRGHFLIEGDLNPDNSDVDKLFIQLVQTYNQLFEENPINASGVDAKAILSARLSKSRRLENLIAQLPGEKKNGLFGNLIAL
SLGLTPNFKSNFDLAEDAKLQLSKDTYDDDLDNLLAQIGDQYADLFLAAKNLSDAILLSDILRVNTEITKAPLSASMIKRY
DEHHQDLTLLKALVRQQLPEKYKEIFFDQSKNGYAGYIDGGASQEEFYKFIKPILEKMDGTEELLVKLNREDLLRKQRTFD
NGSIPHQIHLGELHAILRRQEDFYPFLKDNREKIEKILTFRIPYYVGPLARGNSRFAWMTRKSEETITPWNFEEVVDKGAS
AQSFIERMTNFDKNLPNEKVLPKHSLLYEYFTVYNELTKVKYVTEGMRKPAFLSGEQKKAIVDLLFKTNRKVTVKQLKEDY
FKKIECFDSVEISGVEDRFNASLGTYHDLLKIIKDKDFLDNEENEDILEDIVLTLTLFEDREMIEERLKTYAHLFDDKVMK
QLKRRRYTGWGRLSRKLINGIRDKQSGKTILDFLKSDGFANRNFMQLIHDDSLTFKEDIQKAQVSGQGDSLHEHIANLAGS
PAIKKGILQTVKVVDELVKVMGRHKPENIVIEMARENQTTQKGQKNSRERMKRIEEGIKELGSQILKEHPVENTQLQNEKL
YLYYLQNGRDMYVDQELDINRLSDYDVDAIVPQSFLKDDSIDNKVLTRSDKNRGKSDNVPSEEVVKKMKNYWRQLLNAKLI
TQRKFDNLTKAERGGLSELDKAGFIKRQLVETRQITKHVAQILDSRMNTKYDENDKLIREVKVITLKSKLVSDFRKDFQFY
KVREINNYHHAHDAYLNAVVGTALIKKYPKLESEFVYGDYKVYDVRKMIAKSEQEIGKATAKYFFYSNIMNFFKTEITLAN
GEIRKRPLIETNGETGEIVWDKGRDFATVRKVLSMPQVNIVKKTEVQTGGFSKESILPKRNSDKLIARKKDWDPKKYGGFV
SPTVAYSVLVVAKVEKGKSKKLKSVKELLGITIMERSSFEKNPIDFLEAKGYKEVKKDLIIKLPKYSLFELENGRKRMLAS
ARELQKGNELALPSKYVNFLYLASHYEKLKGSPEDNEQKQLFVEQHKHYLDEIIEQISEFSKRVILADANLDKVLSAYNKH
RDKPIREQAENIIHLFTLTNLGAPAAFKYFDTTIDRKQYRSTKEVLDATLIHQSITGLYETRIDLSQLGGD

[0475] In another particular embodiment, the Cas9 variant having expanded PAM capabilities is SpCas9 (H840A) VQR, having the following amino acid sequence (with the V, Q, R substitutions relative to the SpCas9 (H840A) of SEQ ID NO: 42 show in bold underline. In addition, the methionine residue in SpCas9 (H840) was removed for SpCas9 (H840A) VRQR) (“SpCas9-VQR”). This SpCas9 variant possesses an altered PAM-specificity which recognizes a PAM of 5′-NGA-3′ instead of the canonical PAM of 5′-NGG-3′:

SpCas9-VQR
(SEQ ID NO: 75)
DKKYSIGLDIGTNSVGWAVITDEYKVPSKKFKVLGNTDRHSIKKNLIGALLFDSGETAEATRLKRTARRRYTRRKNRICYL
QEIFSNEMAKVDDSFFHRLEESFLVEEDKKHERHPIFGNIVDEVAYHEKYPTIYHLRKKLVDSTDKADLRLIYLALAHMIK
FRGHFLIEGDLNPDNSDVDKLFIQLVQTYNQLFEENPINASGVDAKAILSARLSKSRRLENLIAQLPGEKKNGLFGNLIAL
SLGLTPNFKSNFDLAEDAKLQLSKDTYDDDLDNLLAQIGDQYADLFLAAKNLSDAILLSDILRVNTEITKAPLSASMIKRY
DEHHQDLTLLKALVRQQLPEKYKEIFFDQSKNGYAGYIDGGASQEEFYKFIKPILEKMDGTEELLVKLNREDLLRKQRTFD
NGSIPHQIHLGELHAILRRQEDFYPFLKDNREKIEKILTFRIPYYVGPLARGNSRFAWMTRKSEETITPWNFEEVVDKGAS
AQSFIERMTNFDKNLPNEKVLPKHSLLYEYFTVYNELTKVKYVTEGMRKPAFLSGEQKKAIVDLLFKTNRKVTVKQLKEDY
FKKIECFDSVEISGVEDRFNASLGTYHDLLKIIKDKDFLDNEENEDILEDIVLTLTLFEDREMIEERLKTYAHLFDDKVMK
QLKRRRYTGWGRLSRKLINGIRDKQSGKTILDFLKSDGFANRNFMQLIHDDSLTFKEDIQKAQVSGQGDSLHEHIANLAGS
PAIKKGILQTVKVVDELVKVMGRHKPENIVIEMARENQTTQKGQKNSRERMKRIEEGIKELGSQILKEHPVENTQLQNEKL
YLYYLQNGRDMYVDQELDINRLSDYDVDAIVPQSFLKDDSIDNKVLTRSDKNRGKSDNVPSEEVVKKMKNYWRQLLNAKLI
TQRKFDNLTKAERGGLSELDKAGFIKRQLVETRQITKHVAQILDSRMNTKYDENDKLIREVKVITLKSKLVSDFRKDFQFY
KVREINNYHHAHDAYLNAVVGTALIKKYPKLESEFVYGDYKVYDVRKMIAKSEQEIGKATAKYFFYSNIMNFFKTEITLAN
GEIRKRPLIETNGETGEIVWDKGRDFATVRKVLSMPQVNIVKKTEVQTGGFSKESILPKRNSDKLIARKKDWDPKKYGGFV
SPTVAYSVLVVAKVEKGKSKKLKSVKELLGITIMERSSFEKNPIDFLEAKGYKEVKKDLIIKLPKYSLFELENGRKRMLAS
AGELQKGNELALPSKYVNFLYLASHYEKLKGSPEDNEQKQLFVEQHKHYLDEIIEQISEFSKRVILADANLDKVLSAYNKH
RDKPIREQAENIIHLFTLTNLGAPAAFKYFDTTIDRKQYRSTKEVLDATLIHQSITGLYETRIDLSQLGGD

[0476] In another particular embodiment, the Cas9 variant having expanded PAM capabilities is SpCas9 (H840A) VRER, having the following amino acid sequence (with the V, R, E, R substitutions relative to the SpCas9 (H840A) of SEQ TD NO: 42 are shown in bold underline. In addition, the methionine residue in SpCas9 (11840) was removed for SpCas9 (H840A) VRER) (“SpCas9-VRER”). This SpCas9 variant possesses an altered PAM-specificity which recognizes a PAM of 5′-NGCG-3′ instead of the canonical PAM of 5′-NGG-3′:

SpCas9-VRER
(SEQ ID NO: 76)
DKKYSIGLDIGTNSVGWAVITDEYKVPSKKFKVLGNTDRHSIKKNLIGALLFDSGETAEATRLKRTARRRYTRRKNRICYL
QEIFSNEMAKVDDSFFHRLEESFLVEEDKKHERHPIFGNIVDEVAYHEKYPTIYHLRKKLVDSTDKADLRLIYLALAHMIK
FRGHFLIEGDLNPDNSDVDKLFIQLVQTYNQLFEENPINASGVDAKAILSARLSKSRRLENLIAQLPGEKKNGLFGNLIAL
SLGLTPNFKSNFDLAEDAKLQLSKDTYDDDLDNLLAQIGDQYADLFLAAKNLSDAILLSDILRVNTEITKAPLSASMIKRY
DEHHQDLTLLKALVRQQLPEKYKEIFFDQSKNGYAGYIDGGASQEEFYKFIKPILEKMDGTEELLVKLNREDLLRKQRTFD
NGSIPHQIHLGELHAILRRQEDFYPFLKDNREKIEKILTFRIPYYVGPLARGNSRFAWMTRKSEETITPWNFEEVVDKGAS
AQSFIERMTNFDKNLPNEKVLPKHSLLYEYFTVYNELTKVKYVTEGMRKPAFLSGEQKKAIVDLLFKTNRKVTVKQLKEDY
FKKIECFDSVEISGVEDRFNASLGTYHDLLKIIKDKDFLDNEENEDILEDIVLTLTLFEDREMIEERLKTYAHLFDDKVMK
QLKRRRYTGWGRLSRKLINGIRDKQSGKTILDFLKSDGFANRNFMQLIHDDSLTFKEDIQKAQVSGQGDSLHEHIANLAGS
PAIKKGILQTVKVVDELVKVMGRHKPENIVIEMARENQTTQKGQKNSRERMKRIEEGIKELGSQILKEHPVENTQLQNEKL
YLYYLQNGRDMYVDQELDINRLSDYDVDAIVPQSFLKDDSIDNKVLTRSDKNRGKSDNVPSEEVVKKMKNYWRQLLNAKLI
TQRKFDNLTKAERGGLSELDKAGFIKRQLVETRQITKHVAQILDSRMNTKYDENDKLIREVKVITLKSKLVSDFRKDFQFY
KVREINNYHHAHDAYLNAVVGTALIKKYPKLESEFVYGDYKVYDVRKMIAKSEQEIGKATAKYFFYSNIMNFFKTEITLAN
GEIRKRPLIETNGETGEIVWDKGRDFATVRKVLSMPQVNIVKKTEVQTGGFSKESILPKRNSDKLIARKKDWDPKKYGGFV
SPTVAYSVLVVAKVEKGKSKKLKSVKELLGITIMERSSFEKNPIDFLEAKGYKEVKKDLIIKLPKYSLFELENGRKRMLAS
ARELQKGNELALPSKYVNFLYLASHYEKLKGSPEDNEQKQLFVEQHKHYLDEIIEQISEFSKRVILADANLDKVLSAYNKH
RDKPIREQAENIIHLFTLTNLGAPAAFKYFDTTIDRKEYRSTKEVLDATLIHQSITGLYETRIDLSQLGGD

[0477] In yet particular embodiment, the Cas9 variant having expanded PAM capabilities is SpCas9-NG, as reported in Nishimasu et al., “Engineered CRISPR-Cas9 nuclease with expanded targeting space,” Science, 2018, 361: 1259-1262, which is incorporated herein by reference. SpCas9-NG (VRVRFRR), having the following amino acid sequence substitutions: R1335V, L1111R, D1135V, G1218R, E1219F, A1322R, and T1337R relative to the canonical SpCas9 sequence (SEQ TD NO: 5. This SpCas9 has a relaxed PAM specificity, i.e., with activity on a PAM of NGH (wherein H=A, T, or C). See Nishimasu et al., “Engineered CRISPR-Cas9 nuclease with expanded targeting space,” Science, 2018, 361: 1259-1262, which is incorporated herein by reference.

SpCas9-NG
(SEQ ID NO: 77)
MDKKYSIGLDIGTNSVGWAVITDEYKVPSKKFKVLGNTDRHSIKKNLIGALLFDSGETAEATRLKRTARRRYTRRKNRICY
LQEIFSNEMAKVDDSFFHRLEESFLVEEDKKHERHPIFGNIVDEVAYHEKYPTIYHLRKKLVDSTDKADLRLIYLALAHMI
KFRGHFLIEGDLNPDNSDVDKLFIQLVQTYNQLFEENPINASGVDAKAILSARLSKSRRLENLIAQLPGEKKNGLFGNLIA
LSLGLTPNFKSNFDLAEDAKLQLSKDTYDDDLDNLLAQIGDQYADLFLAAKNLSDAILLSDILRVNTEITKAPLSASMIKR
YDEHHQDLTLLKALVRQQLPEKYKEIFFDQSKNGYAGYIDGGASQEEFYKFIKPILEKMDGTEELLVKLNREDLLRKQRTF
DNGSIPHQIHLGELHAILRRQEDFYPFLKDNREKIEKILTFRIPYYVGPLARGNSRFAWMTRKSEETITPWNFEEVVDKGA
SAQSFIERMTNFDKNLPNEKVLPKHSLLYEYFTVYNELTKVKYVTEGMRKPAFLSGEQKKAIVDLLFKTNRKVTVKQLKED
YFKKIECFDSVEISGVEDRFNASLGTYHDLLKIIKDKDFLDNEENEDILEDIVLTLTLFEDREMIEERLKTYAHLFDDKVM
KQLKRRRYTGWGRLSRKLINGIRDKQSGKTILDFLKSDGFANRNFMQLIHDDSLTFKEDIQKAQVSGQGDSLHEHIANLAG
SPAIKKGILQTVKVVDELVKVMGRHKPENIVIEMARENQTTQKGQKNSRERMKRIEEGIKELGSQILKEHPVENTQLQNEK
LYLYYLQNGRDMYVDQELDINRLSDYDVDHIVPQSFLKDDSIDNKVLTRSDKNRGKSDNVPSEEVVKKMKNYWRQLLNAKL
ITQRKFDNLTKAERGGLSELDKAGFIKRQLVETRQITKHVAQILDSRMNTKYDENDKLIREVKVITLKSKLVSDFRKDFQF
YKVREINNYHHAHDAYLNAVVGTALIKKYPKLESEFVYGDYKVYDVRKMIAKSEQEIGKATAKYFFYSNIMNFFKTEITLA
NGEIRKRPLIETNGETGEIVWDKGRDFATVRKVLSMPQVNIVKKTEVQTGGFSKESIRPKRNSDKLIARKKDWDPKKYGGF
VSPTVAYSVLVVAKVEKGKSKKLKSVKELLGITIMERSSFEKNPIDFLEAKGYKEVKKDLIIKLPKYSLFELENGRKRMLA
SARFLQKGNELALPSKYVNFLYLASHYEKLKGSPEDNEQKQLFVEQHKHYLDEIIEQISEFSKRVILADANLDKVLSAYNK
HRDKPIREQAENIIHLFTLTNLGAPRAFKYFDTTIDRKVYRSTKEVLDATLIHQSITGLYETRIDLSQLGGD

[0478] In addition, any available methods may be utilized to obtain or construct a variant or mutant Cas9 protein. The term “mutation,” as used herein, refers to a substitution of a residue within a sequence, e.g., a nucleic acid or amino acid sequence, with another residue, or a deletion or insertion of one or more residues within a sequence. Mutations are typically described herein by identifying the original residue followed by the position of the residue within the sequence and by the identity of the newly substituted residue. Various methods for making the amino acid substitutions (mutations) provided herein are well known in the art, and are provided by, for example, Green and Sambrook, Molecular Cloning: A Laboratory Manual (4th ed., Cold Spring Harbor Laboratory Press, Cold Spring Harbor, N.Y. (2012)). Mutations can include a variety of categories, such as single base polymorphisms, microduplication regions, indel, and inversions, and is not meant to be limiting in any way. Mutations can include “loss-of-function” mutations which is the normal result of a mutation that reduces or abolishes a protein activity. Most loss-of-function mutations are recessive, because in a heterozygote the second chromosome copy carries an unmutated version of the gene coding for a fully functional protein whose presence compensates for the effect of the mutation. Mutations also embrace “gain-of-function” mutations, which is one which confers an abnormal activity on a protein or cell that is otherwise not present in a normal condition. Many gain-of-function mutations are in regulatory sequences rather than in coding regions, and can therefore have a number of consequences. For example, a mutation might lead to one or more genes being expressed in the wrong tissues, these tissues gaining functions that they normally lack. Because of their nature, gain-of-function mutations are usually dominant.

[0479] Mutations can be introduced into a reference Cas9 protein using site-directed mutagenesis. Older methods of site-directed mutagenesis known in the art rely on sub-cloning of the sequence to be mutated into a vector, such as an M13 bacteriophage vector, that allows the isolation of single-stranded DNA template. In these methods, one anneals a mutagenic primer (i.e., a primer capable of annealing to the site to be mutated but bearing one or more mismatched nucleotides at the site to be mutated) to the single-stranded template and then polymerizes the complement of the template starting from the 3′ end of the mutagenic primer. The resulting duplexes are then transformed into host bacteria and plaques are screened for the desired mutation. More recently, site-directed mutagenesis has employed PCR methodologies, which have the advantage of not requiring a single-stranded template. In addition, methods have been developed that do not require sub-cloning. Several issues must be considered when PCR-based site-directed mutagenesis is performed. First, in these methods it is desirable to reduce the number of PCR cycles to prevent expansion of undesired mutations introduced by the polymerase. Second, a selection must be employed in order to reduce the number of non-mutated parental molecules persisting in the reaction. Third, an extended-length PCR method is preferred in order to allow the use of a single PCR primer set. And fourth, because of the non-template-dependent terminal extension activity of some thermostable polymerases it is often necessary to incorporate an end-polishing step into the procedure prior to blunt-end ligation of the PCR-generated mutant product.

[0480] Mutations may also be introduced by directed evolution processes, such as phage-assisted continuous evolution (PACE) or phage-assisted noncontinuous evolution (PANCE). The term “phage-assisted continuous evolution (PACE),” as used herein, refers to continuous evolution that employs phage as viral vectors. The general concept of PACE technology has been described, for example, in International PCT Application, PCT/US2009/056194, filed Sep. 8, 2009, published as WO 2010/028347 on Mar. 11, 2010; International PCT Application, PCT/US2011/066747, filed Dec. 22, 2011, published as WO 2012/088381 on Jun. 28, 2012; U.S. application, U.S. Pat. No. 9,023,594, issued May 5, 2015, International PCT Application, PCT/US2015/012022, filed Jan. 20, 2015, published as WO 2015/134121 on Sep. 11, 2015, and International PCT Application, PCT/US2016/027795, filed Apr. 15, 2016, published as WO 2016/168631 on Oct. 20, 2016, the entire contents of each of which are incorporated herein by reference. Variant Cas9s may also be obtain by phage-assisted non-continuous evolution (PANCE),” which as used herein, refers to non-continuous evolution that employs phage as viral vectors. PANCE is a simplified technique for rapid in vivo directed evolution using serial flask transfers of evolving ‘selection phage’ (SP), which contain a gene of interest to be evolved, across fresh E. coli host cells, thereby allowing genes inside the host E. coli to be held constant while genes contained in the SP continuously evolve. Serial flask transfers have long served as a widely-accessible approach for laboratory evolution of microbes, and, more recently, analogous approaches have been developed for bacteriophage evolution. The PANCE system features lower stringency than the PACE system.

[0481] Any of the references noted above which relate to Cas9 or Cas9 equivalents are hereby incorporated by reference in their entireties, if not already stated so.

[0482] III. Adenosine Deaminases (or Adenine Deaminases)

[0483] In some embodiments, the disclosure provides base editors that comprise one or more adenosine deaminase domains. In some aspects, any of the disclosed base editors are capable of deaminating adenosine in a nucleic acid sequence (e.g., DNA or RNA). As one example, any of the base editors provided herein may be base editors, (e.g., adenine base editors). Without wishing to be bound by any particular theory, dimerization of adenosine deaminases (e.g., in cis or in trans) may improve the ability (e.g., efficiency) of the base editor to modify a nucleic acid base, for example to deaminate adenine.

[0484] Exemplary, non-limiting, embodiments of adenosine deaminases are provided herein. In some embodiments, the adenosine deaminase domain of any of the disclosed base editors comprises a single adenosine deaminase, or a monomer. In some embodiments, the adenosine deaminase domain comprises 2, 3, 4 or 5 adenosine deaminases. In some embodiments, the adenosine deaminase domain comprises two adenosine deaminases, or a dimer. In some embodiments, the deaminase domain comprises a dimer of an engineered (or evolved) deaminase and a wild-type deaminase, such as a wild-type E. coli deaminase. It should be appreciated that the mutations provided herein (e.g., mutations in ecTadA) may be applied to adenosine deaminases in other adenosine base editors, for example those provided in International Publication No. WO 2018/027078, published Aug. 2, 2018; International Application No PCT/US2019/033848, filed May 23, 2019, which published as International Publication No. WO 2019/226593 on Nov. 28, 2019; U.S. Patent Publication No. 2018/0073012, published Mar. 15, 2018, which issued as U.S. Pat. No. 10,113,163, on Oct. 30, 2018; U.S. Patent Publication No. 2017/0121693, published May 4, 2017, which issued as U.S. Pat. No. 10,167,457 on Jan. 1, 2019; International Publication No. WO 2017/070633, published Apr. 27, 2017; U.S. Patent Publication No. 2015/0166980, published Jun. 18, 2015; U.S. Pat. No. 9,840,699, issued Dec. 12, 2017; and U.S. Pat. No. 10,077,453, issued Sep. 18, 2018, and U.S. Provisional Application No. 62/835,490, filed Apr. 17, 2019; all of which are incorporated herein by reference in their entireties.

[0485] In some embodiments, any of the adenosine deaminases provided herein are capable of deaminating adenine, e.g., deaminating adenine in a deoxyadenosine residue of DNA. The adenosine deaminase may be derived from any suitable organism (e.g., E. coli). In some embodiments, the adenosine deaminase is a naturally-occurring adenosine deaminase that includes one or more mutations corresponding to any of the mutations provided herein (e.g., mutations in ecTadA). One of skill in the art will be able to identify the corresponding residue in any homologous protein and in the respective encoding nucleic acid by methods well known in the art, e.g., by sequence alignment and determination of homologous residues. Accordingly, one of skill in the art would be able to generate mutations in any naturally-occurring adenosine deaminase (e.g., having homology to ecTadA) that corresponds to any of the mutations described herein, e.g., any of the mutations identified in ecTadA. In some embodiments, the adenosine deaminase is derived from a prokaryote. In some embodiments, the adenosine deaminase is from a bacterium. In some embodiments, the adenosine deaminase is from Escherichia coli, Staphylococcus aureus, Salmonella typhi, Shewanella putrefaciens, Haemophilus influenzae, Caulobacter crescentus, or Bacillus subtilis. In some embodiments, the adenosine deaminase is from E. coli.

[0486] In some embodiments, the adenosine deaminase may comprise one or more substitutions that include R26G, V69A, V88A, A109S, T111R, D119N, H122N, Y147D, F149Y, T166I, D167N relative to TadA7.10 (SEQ ID NO: 79), or a substitution at a corresponding amino acid in another adenosine deaminase. In some embodiments, the adenosine deaminase comprises T111R, D119N, and F149Y substitutions in TadA7.10 (SEQ ID NO: 79), or a corresponding mutation in another adenosine deaminase. In particular embodiments, the adenosine deaminase comprises T111R, D119N, and F149Y substitutions, and further comprises at least one substitution selected from R26C, V88A, A109S, H122N, T166I, and D167N, in TadA7.10 (SEQ ID NO: 79), or a corresponding mutation in another adenosine deaminase.

[0487] In some embodiments, the adenosine deaminase comprises A109S, T111R, D119N, H122N, F149Y, T166I, and D167N substitutions in TadA7.10 (SEQ ID NO: 79), or a corresponding mutation in another adenosine deaminase. In some embodiments, the adenosine deaminase comprises R26C, D108W, T111R, D119N, and F149Y substitutions in TadA7.10 (SEQ ID NO: 79), or a corresponding mutation in another adenosine deaminase. In some embodiments, the adenosine deaminase comprises V88A, D108W, T111R, D119N, and F149Y substitutions in TadA7.10 (SEQ ID NO: 79), or a corresponding mutation in another adenosine deaminase. In some embodiments, the adenosine deaminase further comprises a Y147D substitution in TadA7.10 (SEQ ID NO: 79), or a corresponding mutation in another adenosine deaminase.

[0488] In some embodiments, the adenosine deaminase comprises A109S, T111R, D119N, H122N, Y147D, F149Y, T166I and D167N substitutions in TadA7.10 (SEQ ID NO: 79), or a corresponding mutation in another adenosine deaminase. In some embodiments, the adenosine deaminase comprises TadA-8e. In some embodiments, the adenosine deaminase comprises A109S, T111R, D119N, H122N, Y147D, F149Y, T166I and D167N in TadA7.10 (SEQ ID NO: 79), or a corresponding mutation in another adenosine deaminase. In some embodiments, the adenosine deaminase further comprises at least one substitution selected from K20A, R21A, V82G, and V106W in TadA7.10 (SEQ ID NO: 79), or a corresponding mutation in another adenosine deaminase. In certain embodiments, the adenosine deaminase comprises V106W, A109S, T111R, D119N, H122N, Y147D, F149Y, T166I and D167N substitutions in TadA7.10 (SEQ ID NO: 79), or a corresponding mutation in another adenosine deaminase. In some embodiments, the adenosine deaminase comprises TadA-8e(V106W). It should be appreciated, however, that additional deaminases may similarly be aligned to identify homologous amino acid residues that may be mutated as provided herein.

[0489] It should be appreciated that any of the mutations provided herein (e.g., based on the ecTadA amino acid sequence of SEQ ID NO: 78) may be introduced into other adenosine deaminases, such as S. aureus TadA (saTadA), or other adenosine deaminases (e.g., bacterial adenosine deaminases), such as those sequences provided below. It would be apparent to the skilled artisan how to identify amino acid residues from other adenosine deaminases that are homologous to the mutated residues in ecTadA. Thus, any of the mutations identified in ecTadA may be made in other adenosine deaminases that have homologous amino acid residues. It should also be appreciated that any of the mutations provided herein may be made individually or in any combination in ecTadA or another adenosine deaminase.

[0490] Exemplary adenosine deaminase variants of the disclosure are described below. In certain embodiments, the adenosine deaminase domain comprises an adenosine deaminase that has a sequence with at least 80%, at least 85%, at least 90%, at least 95%, at least 98%, at least 99%, or at least 99.5% sequence identity to one of the following:

E. coli TadA
(SEQ ID NO: 78)
MSEVEFSHEYWMRHALTLAKRAWDEREVPVGAVLV
HNNRVIGEGWNRPIGRHDPTAHAEIMALRQGGLVM
QNYRLIDATLYVTLEPCVMCAGAMIHSRIGRVVFG
ARDAKTGAAGSLMDVLHHPGMNHRVEITEGILADE
CAALLSDFFRMRRQEIKAQKKAQSSTD
E. coli TadA 7.10
(SEQ ID NO: 79)
MSEVEFSHEYWMRHALTLAKRARDEREVPVGAVLV
LNNRVIGEGWNRAIGLHDPTAHAEIMALRQGGLVM
QNYRLIDATLYVTFEPCVMCAGAMIHSRIGRVVFG
VRNAKTGAAGSLMDVLHYPGMNHRVEITEGILADE
CAALLCYFFRMPRQVFNAQKKAQSSTD
E. coli TadA* 7.10
(SEQ ID NO: 403)
SEVEFSHEYWMRHALTLAKRARDEREVPVGAVLVL
NNRVIGEGWNRAIGLHDPTAHAEIMALRQGGLVMQ
NYRLIDATLYVTFEPCVMCAGAMIHSRIGRVVFGV
RNAKTGAAGSLMDVLHYPGMNHRVEITEGILADEC
AALLCYFFRMPRQVFNAQKKAQSSTD
ABE7.10 TadA* monomer
DNA sequence
(SEQ ID NO: 404)
TCTGAGGTGGAGTTTTCCCACGAGTACTGGATGAG
ACATGCCCTGACCCTGGCCAAGAGGGCACGCGATG
AGAGGGAGGTGCCTGTGGGAGCCGTGCTGGTGCTG
AACAATAGAGTGATCGGCGAGGGCTGGAACAGAGC
CATCGGCCTGCACGACCCAACAGCCCATGCCGAAA
TTATGGCCCTGAGACAGGGCGGCCTGGTCATGCAG
AACTACAGACTGATTGACGCCACCCTGTACGTGAC
ATTCGAGCCTTGCGTGATGTGCGCCGGCGCCATGA
TCCACTCTAGGATCGGCCGCGTGGTGTTTGGCGTG
AGGAACGCAAAAACCGGCGCCGCAGGCTCCCTGAT
GGACGTGCTGCACTACCCCGGCATGAATCACCGCG
TCGAAATTACCGAGGGAATCCTGGCAGATGAATGT
GCCGCCCTGCTGTGCTATTTCTTTCGGATGCCTAG
ACAGGTGTTCAATGCTCAGAAGAAGGCCCAGAGCT
CCACCGAC
E. coli TadA 7.10 (V106W)
(SEQ ID NO: 80)
MSEVEFSHEYWMRHALTLAKRARDEREVPVGAVLV
LNNRVIGEGWNRAIGLHDPTAHAEIMALRQGGLVM
QNYRLIDATLYVTFEPCVMCAGAMIHSRIGRVVFG
WRNAKTGAAGSLMDVLHYPGMNHRVEITEGILADE
CAALLCYFFRMPRQVFNAQKKAQSSTD
Staphylococcus aureus TadA
(SEQ ID NO: 81)
MGSHMTNDIYFMTLAIEEAKKAAQLGEVPIGAIIT
KDDEVIARAHNLRETLQQ
PTAHAEHIAIERAAKVLGSWRLEGCTLYVTLEPCV
MCAGTIVMSRIPRVVYGADDPKGGCSGSLMNLLQQ
SNFNHRAIVDKGVLKEACSTLLTTFFKNLRANKKS
TN
Streptococcus pyogenes (S. pyogenes) TadA
(SEQ ID NO: 3238)
MPYSLEEQTYFMQEALKEAEKSLQKAEIPIGCVIV
KDGEIIGRGHNAREESNQAIMHAEIMAINEANAHE
GNWRLLDTTLFVTIEPCVMCSGAIGLARIPHVIYG
ASNQKFGGADSLYQILTDERLNHRVQVERGLLAAD
CANIMQTFFRQGRERKKIAKHLIKEQSDPFD
Bacillus subtilis TadA
(SEQ ID NO: 82)
MTQDELYMKEAIKEAKKAEEKGEVPIGAVLVINGE
IIARAHNLRETEQRSIAHAEMLVIDEACKALGTWR
LEGATLYVTLEPCPMCAGAVVLSRVEKVVFGAFDP
KGGCSGTLMNLLQEERFNHQAEVVSGVLEEECGGM
LSAFFRELRKKKKAARKNLSE
Salmonella typhimurium TadA
(SEQ ID NO: 83)
MPPAFITGVTSLSDVELDHEYWMRHALTLAKRAWD
EREVPVGAVLVHNHRVIGEGWNRPIGRHDPTAHAE
IMALRQGGLVLQNYRLLDTTLYVTLEPCVMCAGAM
VHSRIGRVVFGARDAKTGAAGSLIDVLHHPGMNHR
VEIIEGVLRDECATLLSDFFRMRRQEIKALKKADR
AEGAGPAV
Shewanella putrefaciens TadA
(SEQ ID NO: 84)
MDEYWMQVAMQMAEKAEAAGEVPVGAVLVKDGQQI
ATGYNLSISQHDPTAHAEILCLRSAGKKLENYRLL
DATLYITLEPCAMCAGAMVHSRIARVVYGARDEKT
GAAGTVVNLLQHPAFNHQVEVTSGVLAEACSAQLS
RFFKRRRDEKKALKLAQRAQQGIE
Haemophilus influenzae F3 031 Tad A
(SEQ ID NO: 85)
MDAAKVRSEFDEKMMRYALELADKAEALGEIPVGA
VLVDDARNIIGEGWNLSIVQSDPTAHAEIIALRNG
AKNIQNYRLLNSTLYVTLEPCTMCAGAILHSRIKR
LVFGASDYKTGAIGSRFHFFDDYKMNHTLEITSGV
LAEECSQKLSTFFQKRREEKKIEKALLKSLSDK
Caulobacter crescentus TadA
(SEQ ID NO: 86)
MRTDESEDQDHRMMRLALDAARAAAEAGETPVGAVI
LDPSTGEVIATAGNGPIAAHDPTAHAEIAAMRAAA
AKLGNYRLTDLTLVVTLEPCAMCAGAISHARIGRV
VFGADDPKGGAVVHGPKFFAQPTCHWRPEVTGGVL
ADESADLLRGFFRARRKAKI
Geobacter sulfurreducens TadA
(SEQ ID NO: 87)
MSSLKKTPIRDDAYWMGKAIREAAKAAARDEVPIG
AVIVRDGAVIGRGHNLREGSNDPSAHAEMIAIRQA
ARRSANWRLTGATLYVTLEPCLMCMGAIILARLER
VVFGCYDPKGAAGSLYDLSADPRLNHQVRLSPGVC
QEECGTMLSDFFRDLRRRKKAKATPALFIDERKVP
PEP

[0491] In some embodiments, the adenosine deaminase domain comprises an N-terminal truncated E. coli TadA. In certain embodiments, the adenosine deaminase comprises the amino acid sequence:

(SEQ ID NO: 78)
MSEVEFSHEYWMRHALTLAKRAWDEREVPVGAVLV
HNNRVIGEGWNRPIGRHDPTAHAEIMALRQGGLVM
QNYRLIDATLYVTLEPCVMCAGAMIHSRIGRVVFG
ARDAKTGAAGSLMDVLHHPGMNHRVEITEGILADE
CAALLSDFFRMRRQEIKAQKKAQSSTD.

[0492] In some embodiments, the TadA deaminase is a full-length E. coli TadA deaminase (ecTadA). For example, in certain embodiments, the adenosine deaminase domain comprises a deaminase that comprises the amino acid sequence:

(SEQ ID NO: 89)
MRRAFITGVFFLSEVEFSHEYWMRHALTLAKRAWD
EREVPVGAVLVHNNRVIGEGWNRPIGRHDPTAHAE
IMALRQGGLVMQNYRLIDATLYVTLEPCVMCAGAM
IHSRIGRVVFGARDAKTGAAGSLMDVLHHPGMNHR
VEITEGILADECAALLSDFFRMRRQEIKAQKKAQS
STD
ABE8 TadA* monomer
DNA sequence
(SEQ ID NO: 90)
TCTGAGGTGGAGTTTTCCCACGAGTACTGGATGAG
ACATGCCCTGACCCTGGCCAAGAGGGCACGGGATG
AGAGGGAGGTGCCTGTGGGAGCCGTGCTGGTGCTG
AACAATAGAGTGATCGGCGAGGGCTGGAACAGAGC
CATCGGCCTGCACGACCCAACAGCCCATGCCGAAA
TTATGGCCCTGAGACAGGGCGGCCTGGTCATGCAG
AACTACAGACTGATTGACGCCACCCTGTACGTGAC
ATTCGAGCCTTGCGTGATGTGCGCCGGCGCCATGA
TCCACTCTAGGATCGGCCGCGTGGTGTTTGGCGTG
AGGAACTCAAAAAGAGGCGCCGCAGGCTCCCTGAT
GAACGTGCTGAACTACCCCGGCATGAATCACCGCG
TCGAAATTACCGAGGGAATCCTGGCAGATGAATGT
GCCGCCCTGCTGTGCGATTTCTATCGGATGCCTAG
ACAGGTGTTCAATGCTCAGAAGAAGGCCCAGAGCT
CCATCAAC
ABE8 TadA* monomer
Amino Acid Sequence
(SEQ ID NO: 91)
MSEVEFSHEYWMRHALTLAKRARDEREVPVGAVLV
LNNRVIGEGWNRAIGLHDPTAHAEIMALRQGGLVM
QNYRLIDATLYVTFEPCVMCAGAMIHSRIGRVVFG
VRNSKRGAAGSLMNVLNYPGMNHRVEITEGILADE
CAALLCDFYRMPRQVFNAQKKAQSSIN

[0493] In other aspects, the disclosure provides adenine base editors with broadened target sequence compatibility. In general, native ecTadA deaminates the adenine in the sequence UAC (e.g., the target sequence) of the anticodon loop of tRNA^{Arg}. Without wishing to be bound by any particular theory, in order to expand the utility of ABEs comprising one or more ecTadA deaminases, such as any of the adenosine deaminases provided herein, the adenosine deaminase proteins were optimized to recognize a wide variety of target sequences within the protospacer sequence without compromising the editing efficiency of the adenosine nucleobase editor complex. In some embodiments, the target sequence is an A in the center of a 5′-NAN-3′ sequence, wherein N is T, C, G, or A. In some embodiments, the target sequence comprises 5′-TAC-3′. In some embodiments, the target sequence comprises 5′-GAA-3′.

[0494] Any two or more of the adenosine deaminases described herein may be connected to one another (e.g., by a linker) within an adenosine deaminase domain of the base editors provided herein. For instance, the base editors provided herein may contain only two adenosine deaminases. In some embodiments, the adenosine deaminases are the same. In some embodiments, the adenosine deaminases are any of the adenosine deaminases provided herein. In some embodiments, the adenosine deaminases are different. In some embodiments, the first adenosine deaminase is any of the adenosine deaminases provided herein, and the second adenosine is any of the adenosine deaminases provided herein, but is not identical to the first adenosine deaminase. In some embodiments, the base editor comprises two adenosine deaminases (e.g., a first adenosine deaminase and a second adenosine deaminase). In some embodiments, the base editor comprises a first adenosine deaminase and a second adenosine deaminase. In some embodiments, the first adenosine deaminase is N-terminal to the second adenosine deaminase in the base editor. In some embodiments, the first adenosine deaminase is C-terminal to the second adenosine deaminase in the base editor. In some embodiments, the first adenosine deaminase and the second deaminase are fused directly or via a linker.

[0495] In some embodiments, the adenosine deaminase domain comprises an adenosine deaminase that comprises an amino acid sequence that is at least 60%, at least 65%, at least 70%, at least 75%, at least 80%, at least 85%, at least 90%, at least 95%, at least 96%, at least 97%, at least 98%, at least 99%, or at least 99.5% identical to any one of the amino acid sequences set forth in any one of SEQ ID NOs: 78-91, or to any of the adenosine deaminases provided herein. In certain embodiments, the adenosine deaminase comprises an amino acid sequence that is at least 80%, at least 85%, at least 90%, at least 95%, at least 96%, at least 97%, at least 98%, at least 99%, or at least 99.5% identical to the amino acid sequence of TadA7.10 (SEQ ID NO: 403). It should be appreciated that adenosine deaminases provided herein may include one or more mutations (e.g., any of the mutations provided herein). The disclosure provides adenosine deaminases with a certain percent identity plus any of the mutations or combinations thereof described herein. In some embodiments, the adenosine deaminase comprises an amino acid sequence that has 1, 2, 3, 4, 5, 6, 7, 8, 9, 10, 11, 12, 13, 14, 15, 16, 17, 18, 19, 20, 21, 22, 21, 24, 25, 26, 27, 28, 29, 30, 31, 32, 33, 34, 35, 36, 37, 38, 39, 40, 41, 42, 43, 44, 45, 46, 47, 48, 49, 50, or more mutations compared to any one of the amino acid sequences set forth in SEQ ID NOs: 78-91, and 403-404 (e.g., TadA7.10), or any of the adenosine deaminases provided herein. In some embodiments, the adenosine deaminase comprises an amino acid sequence that has at least 5, at least 10, at least 15, at least 20, at least 25, at least 30, at least 35, at least 40, at least 45, at least 50, at least 60, at least 70, at least 80, at least 90, at least 100, at least 110, at least 120, at least 130, at least 140, at least 150, at least 160, or at least 170 identical contiguous amino acid residues as compared to any one of the amino acid sequences set forth in SEQ ID NOs: 78-91, and 403-404 (e.g., TadA7.10), or any of the adenosine deaminases provided herein.

[0496] In some embodiments, the adenosine deaminase comprises TadA 7.10, whose sequence is set forth as SEQ ID NO: 79, or a variant thereof. TadA7.10 comprises the following mutations in wild-type ecTadA: W23R, H36L, P48A, R51L, L84F, A106V, D108N, H123Y, S146C, D147Y, R152P, E155V, I156F, and K157N.

[0497] In some embodiments, the adenosine deaminase is at least 50%, at least 55%, at least 60%, at least 65%, at least 70%, at least 75% at least 80%, at least 85%, at least 90%, at least 95%, at least 96%, at least 97%, at least 98%, at least 99%, or at least 99.5% identical to a naturally-occurring adenosine deaminase, e.g., E. coli TadA 7.10 of SEQ ID NO: 79. In some embodiments, the adenosine deaminase is from a bacterium, such as, E. coli, S. aureus, S. typhi, S. putrefaciens, H. influenzae, or C. crescentus. In some embodiments, the adenosine deaminase is a TadA deaminase. In some embodiments, the TadA deaminase is an E. coli TadA deaminase (ecTadA). In some embodiments, the TadA deaminase is a truncated E. coli TadA deaminase. For example, the truncated ecTadA may be missing one or more N-terminal or C-terminal amino acids relative to a full-length ecTadA. In some embodiments, the truncated ecTadA may be missing 1, 2, 3, 4, 5, 6, 7, 8, 9, 10, 11, 12, 13, 14, 15, 6, 17, 18, 19, or 20 N-terminal amino acid residues relative to the full length ecTadA. In some embodiments, the truncated ecTadA may be missing 1, 2, 3, 4, 5, 6, 7, 8, 9, 10, 11, 12, 13, 14, 15, 6, 17, 18, 19, or 20 C-terminal amino acid residues relative to the full length ecTadA. In some embodiments, the ecTadA deaminase does not comprise an N-terminal methionine.

[0498] In some embodiments, the TadA 7.10 of SEQ ID NO: 79 comprises an N-terminal methionine. It should be appreciated that the amino acid numbering scheme relating to the mutations in TadA 7.10 may be based on the TadA sequence of SEQ ID NO: 78, which contains an N-terminal methionine.

[0499] In some embodiments, the adenosine deaminase comprises a D108X mutation in ecTadA SEQ ID NO: 89, or a corresponding mutation in another adenosine deaminase, where X indicates any amino acid other than the corresponding amino acid in the wild-type adenosine deaminase. In some embodiments, the adenosine deaminase comprises a D108G, D108N, D108V, D108A, or D108Y mutation in ecTadA SEQ ID NO: 89, or a corresponding mutation in another adenosine deaminase. In some embodiments, the adenosine deaminase comprises a D108N mutation in ecTadA SEQ ID NO: 89, or a corresponding mutation in another adenosine deaminase. It should be appreciated, however, that additional deaminases may similarly be aligned to identify homologous amino acid residues that can be mutated as provided herein.

[0500] In some embodiments, the adenosine deaminase comprises an A106X mutation in ecTadA SEQ ID NO: 78, or a corresponding mutation in another adenosine deaminase, where X indicates any amino acid other than the corresponding amino acid in the wild-type adenosine deaminase. In some embodiments, the adenosine deaminase comprises an A106V mutation in ecTadA SEQ ID NO: 78, or a corresponding mutation in another adenosine deaminase.

[0501] In some embodiments, the adenosine deaminase comprises a E155X mutation in ecTadA SEQ ID NO: 78, or a corresponding mutation in another adenosine deaminase, where the presence of X indicates any amino acid other than the corresponding amino acid in the wild-type adenosine deaminase. In some embodiments, the adenosine deaminase comprises a E155D, E155G, or E155V mutation in ecTadA SEQ ID NO: 78, or a corresponding mutation in another adenosine deaminase. In some embodiments, the adenosine deaminase comprises a E155V mutation in ecTadA SEQ ID NO: 78, or a corresponding mutation in another adenosine deaminase).

[0502] In some embodiments, the adenosine deaminase comprises a D147X mutation in ecTadA SEQ ID NO: 78, or a corresponding mutation in another adenosine deaminase, where the presence of X indicates any amino acid other than the corresponding amino acid in the wild-type adenosine deaminase. In some embodiments, the adenosine deaminase comprises a D147Y mutation in ecTadA SEQ ID NO: 78, or a corresponding mutation in another adenosine deaminase.

[0503] In some embodiments, an adenosine deaminase comprises the following group of mutations (groups of mutations are separated by a “;”) in ecTadA SEQ ID NO: 78, or corresponding mutations in another adenosine deaminase: D108N and A106V; D108N and E155V; D108N and D147Y; A106V and E155V; A106V and D147Y; E155V and D147Y; D108N, A106V, and E55V; D108N, A106V, and D147Y; D108N, E55V, and D147Y; A106V, E55V, and D147Y; and D108N, A106V, E55V, and D147Y. It should be appreciated, however, that any combination of corresponding mutations provided herein may be made in an adenosine deaminase (e.g., ecTadA). In some embodiments, an adenosine deaminase comprises one or more of the mutations provided herein, which identifies individual mutations and combinations of mutations made in ecTadA. In some embodiments, an adenosine deaminase comprises any mutation or combination of mutations provided herein.

[0504] In some embodiments, the adenosine deaminase comprises an L84X mutation in ecTadA SEQ ID NO: 78, or a corresponding mutation in another adenosine deaminase, where X indicates any amino acid other than the corresponding amino acid in the wild-type adenosine deaminase. In some embodiments, the adenosine deaminase comprises an L84F mutation in ecTadA SEQ ID NO: 78, or a corresponding mutation in another adenosine deaminase.

[0505] In some embodiments, the adenosine deaminase comprises an H123X mutation in ecTadA SEQ ID NO: 78, or a corresponding mutation in another adenosine deaminase, where X indicates any amino acid other than the corresponding amino acid in the wild-type adenosine deaminase. In some embodiments, the adenosine deaminase comprises an H123Y mutation in ecTadA SEQ ID NO: 78, or a corresponding mutation in another adenosine deaminase.

[0506] In some embodiments, the adenosine deaminase comprises an I156X mutation in ecTadA SEQ ID NO: 78, or a corresponding mutation in another adenosine deaminase, where X indicates any amino acid other than the corresponding amino acid in the wild-type adenosine deaminase. In some embodiments, the adenosine deaminase comprises an I156F mutation in ecTadA SEQ ID NO: 78, or a corresponding mutation in another adenosine deaminase.

[0507] In some embodiments, the adenosine deaminase comprises one, two, three, four, five, six, or seven mutations selected from the group consisting of L84X, A106X, D108X, H123X, D147X, E155X, and I156X in ecTadA SEQ ID NO: 78, or a corresponding mutation or mutations in another adenosine deaminase, where X indicates the presence of any amino acid other than the corresponding amino acid in the wild-type adenosine deaminase.

[0508] In some embodiments, the adenosine deaminase comprises one, two, three, four, five, six, or seven mutations selected from the group consisting of L84F, A106V, D108N, H123Y, D147Y, E155V, and I156F in ecTadA SEQ ID NO: 78, or a corresponding mutation or mutations in another adenosine deaminase. In some embodiments, the adenosine deaminase comprises one, two, three, four, five, or six mutations selected from the group consisting of S2A, I49F, A106V, D108N, D147Y, and E155V in ecTadA SEQ ID NO: 78, or a corresponding mutation or mutations in another adenosine deaminase. In some embodiments, the adenosine deaminase comprises one, two, three, four, or five, mutations selected from the group consisting of H8Y, A106T, D108N, N127S, and K160S in ecTadA SEQ ID NO: 78, or a corresponding mutation or mutations in another adenosine deaminase.

[0509] In some embodiments, the adenosine deaminase comprises an A142X mutation in ecTadA SEQ ID NO: 78, or a corresponding mutation in another adenosine deaminase, where X indicates any amino acid other than the corresponding amino acid in the wild-type adenosine deaminase. In some embodiments, the adenosine deaminase comprises an A142N, A142D, A142G, mutation in ecTadA SEQ ID NO: 78, or a corresponding mutation in another adenosine deaminase. In some embodiments, the adenosine deaminase comprises an A142N mutation in ecTadA SEQ ID NO: 78, or a corresponding mutation in another adenosine deaminase.

[0510] In some embodiments, the adenosine deaminase comprises an H36X mutation in ecTadA SEQ ID NO: 78, or a corresponding mutation in another adenosine deaminase, where X indicates any amino acid other than the corresponding amino acid in the wild-type adenosine deaminase. In some embodiments, the adenosine deaminase comprises an H36L mutation in ecTadA SEQ ID NO: 78, or a corresponding mutation in another adenosine deaminase.

[0511] In some embodiments, the adenosine deaminase comprises an N37X mutation in ecTadA SEQ ID NO: 78, or a corresponding mutation in another adenosine deaminase, where X indicates any amino acid other than the corresponding amino acid in the wild-type adenosine deaminase. In some embodiments, the adenosine deaminase comprises an N37T, or N37S mutation in ecTadA SEQ ID NO: 78, or a corresponding mutation in another adenosine deaminase. In some embodiments, the adenosine deaminase comprises a N37S mutation in ecTadA SEQ ID NO: 78, or a corresponding mutation in another adenosine deaminase.

[0512] In some embodiments, the adenosine deaminase comprises an P48X mutation in ecTadA SEQ ID NO: 78, or a corresponding mutation in another adenosine deaminase, where X indicates any amino acid other than the corresponding amino acid in the wild-type adenosine deaminase. In some embodiments, the adenosine deaminase comprises an P48T, P48S, P48A, or P48L mutation in ecTadA SEQ ID NO: 78, or a corresponding mutation in another adenosine deaminase. In some embodiments, the adenosine deaminase comprises a P48T mutation in ecTadA SEQ ID NO: 78, or a corresponding mutation in another adenosine deaminase. In some embodiments, the adenosine deaminase comprises a P48S mutation in ecTadA SEQ ID NO: 78, or a corresponding mutation in another adenosine deaminase. In some embodiments, the adenosine deaminase comprises a P48A mutation in ecTadA SEQ ID NO: 78, or a corresponding mutation in another adenosine deaminase.

[0513] In some embodiments, the adenosine deaminase comprises an R51X mutation in ecTadA SEQ ID NO: 78, or a corresponding mutation in another adenosine deaminase, where X indicates any amino acid other than the corresponding amino acid in the wild-type adenosine deaminase. In some embodiments, the adenosine deaminase comprises an R51H, or R51L mutation in ecTadA SEQ ID NO: 78, or a corresponding mutation in another adenosine deaminase. In some embodiments, the adenosine deaminase comprises a R51L mutation in ecTadA SEQ ID NO: 78, or a corresponding mutation in another adenosine deaminase.

[0514] In some embodiments, the adenosine deaminase comprises an S146X mutation in ecTadA SEQ ID NO: 78, or a corresponding mutation in another adenosine deaminase, where X indicates any amino acid other than the corresponding amino acid in the wild-type adenosine deaminase. In some embodiments, the adenosine deaminase comprises an S146R, or S146C mutation in ecTadA SEQ ID NO: 78, or a corresponding mutation in another adenosine deaminase. In some embodiments, the adenosine deaminase comprises a S146C mutation in ecTadA SEQ ID NO: 78, or a corresponding mutation in another adenosine deaminase.

[0515] In some embodiments, the adenosine deaminase comprises an K157X mutation in ecTadA SEQ ID NO: 78, or a corresponding mutation in another adenosine deaminase, where X indicates any amino acid other than the corresponding amino acid in the wild-type adenosine deaminase. In some embodiments, the adenosine deaminase comprises a K157N mutation in ecTadA SEQ ID NO: 78, or a corresponding mutation in another adenosine deaminase.

[0516] In some embodiments, the adenosine deaminase comprises an W23X mutation in ecTadA SEQ ID NO: 78, or a corresponding mutation in another adenosine deaminase, where X indicates any amino acid other than the corresponding amino acid in the wild-type adenosine deaminase. In some embodiments, the adenosine deaminase comprises a W23R, or W23L mutation in ecTadA SEQ ID NO: 78, or a corresponding mutation in another adenosine deaminase. In some embodiments, the adenosine deaminase comprises a W23R mutation in ecTadA SEQ ID NO: 78, or a corresponding mutation in another adenosine deaminase. In some embodiments, the adenosine deaminase comprises a W23L mutation in ecTadA SEQ ID NO: 78, or a corresponding mutation in another adenosine deaminase.

[0517] In some embodiments, the adenosine deaminase comprises an R152X mutation in ecTadA SEQ ID NO: 78, or a corresponding mutation in another adenosine deaminase, where X indicates any amino acid other than the corresponding amino acid in the wild-type adenosine deaminase. In some embodiments, the adenosine deaminase comprises a R152P, or R52H mutation in ecTadA SEQ ID NO: 78, or a corresponding mutation in another adenosine deaminase. In some embodiments, the adenosine deaminase comprises a R152P mutation in ecTadA SEQ ID NO: 78, or a corresponding mutation in another adenosine deaminase. In some embodiments, the adenosine deaminase comprises a R152H mutation in ecTadA SEQ ID NO: 78, or a corresponding mutation in another adenosine deaminase.

[0518] In some embodiments, the adenosine deaminase comprises an R26X mutation in ecTadA SEQ ID NO: 78, or a corresponding mutation in another adenosine deaminase, where X indicates any amino acid other than the corresponding amino acid in the wild-type adenosine deaminase. In some embodiments, the adenosine deaminase comprises a R26G mutation in ecTadA SEQ ID NO: 78, or a corresponding mutation in another adenosine deaminase.

[0519] In some embodiments, the adenosine deaminase comprises an I49X mutation in ecTadA SEQ ID NO: 78, or a corresponding mutation in another adenosine deaminase, where X indicates any amino acid other than the corresponding amino acid in the wild-type adenosine deaminase. In some embodiments, the adenosine deaminase comprises a I49V mutation in ecTadA SEQ ID NO: 78, or a corresponding mutation in another adenosine deaminase.

[0520] In some embodiments, the adenosine deaminase comprises an N72X mutation in ecTadA SEQ ID NO: 78, or a corresponding mutation in another adenosine deaminase, where X indicates any amino acid other than the corresponding amino acid in the wild-type adenosine deaminase. In some embodiments, the adenosine deaminase comprises a N72D mutation in ecTadA SEQ ID NO: 78, or a corresponding mutation in another adenosine deaminase.

[0521] In some embodiments, the adenosine deaminase comprises an S97X mutation in ecTadA SEQ ID NO: 78, or a corresponding mutation in another adenosine deaminase, where X indicates any amino acid other than the corresponding amino acid in the wild-type adenosine deaminase. In some embodiments, the adenosine deaminase comprises a S97C mutation in ecTadA SEQ ID NO: 78, or a corresponding mutation in another adenosine deaminase.

[0522] In some embodiments, the adenosine deaminase comprises an G125X mutation in ecTadA SEQ ID NO: 78, or a corresponding mutation in another adenosine deaminase, where X indicates any amino acid other than the corresponding amino acid in the wild-type adenosine deaminase. In some embodiments, the adenosine deaminase comprises a G125A mutation in ecTadA SEQ ID NO: 78, or a corresponding mutation in another adenosine deaminase.

[0523] In some embodiments, the adenosine deaminase comprises an K161X mutation in ecTadA SEQ ID NO: 78, or a corresponding mutation in another adenosine deaminase, where X indicates any amino acid other than the corresponding amino acid in the wild-type adenosine deaminase. In some embodiments, the adenosine deaminase comprises a K161T mutation in ecTadA SEQ ID NO: 78, or a corresponding mutation in another adenosine deaminase.

[0524] In some embodiments, the adenosine deaminase comprises one or more of a W23X, H36X, N37X, P48X, I49X, R51X, N72X, L84X, S97X, A106X, D108X, H123X, G125X, A142X, S146X, D147X, R152X, E155X, I156X, K157X, and/or K161X mutation in ecTadA SEQ ID NO: 78, or one or more corresponding mutations in another adenosine deaminase, where the presence of X indicates any amino acid other than the corresponding amino acid in the wild-type adenosine deaminase. In some embodiments, the adenosine deaminase comprises one or more of W23L, W23R, H36L, P48S, P48A, R51L, L84F, A106V, D108N, H123Y, A142N, S146C, D147Y, R152P, E155V, I156F, and/or K157N mutation in ecTadA SEQ ID NO: 78, or one or more corresponding mutations in another adenosine deaminase. In some embodiments, the adenosine deaminase comprises one or more of the mutations provided herein corresponding to ecTadA SEQ ID NO: 78, or one or more corresponding mutations in another adenosine deaminase.

[0525] In some embodiments, the adenosine deaminase comprises or consists of one or two mutations selected from A106X and D108X in ecTadA SEQ ID NO: 78, or a corresponding mutation or mutations in another adenosine deaminase, where X indicates the presence of any amino acid other than the corresponding amino acid in the wild-type adenosine deaminase. In some embodiments, the adenosine deaminase comprises or consists of one or two mutations selected from A106V and D108N in ecTadA SEQ ID NO: 78, or a corresponding mutation or mutations in another adenosine deaminase.

[0526] In some embodiments, the adenosine deaminase comprises or consists of one, two, three, or four mutations selected from A106X, D108X, D147X, and E155X in ecTadA SEQ ID NO: 78, or a corresponding mutation or mutations in another adenosine deaminase, where X indicates the presence of any amino acid other than the corresponding amino acid in the wild-type adenosine deaminase. In some embodiments, the adenosine deaminase comprises or consists of one, two, three, or four mutations selected from A106V, D108N, D147Y, and E155V in ecTadA SEQ ID NO: 78, or a corresponding mutation or mutations in another adenosine deaminase. In some embodiments, the adenosine deaminase comprises or consists of a A106V, D108N, D147Y, and E155V mutation in ecTadA SEQ ID NO: 78, or corresponding mutations in another adenosine deaminase.

[0527] In some embodiments, the adenosine deaminase comprises or consists of one, two, three, four, five, six, or seven mutations selected from L84X, A106X, D108X, H123X, D147X, E155X, and I156X in ecTadA SEQ ID NO: 78, or a corresponding mutation or mutations in another adenosine deaminase, where X indicates the presence of any amino acid other than the corresponding amino acid in the wild-type adenosine deaminase. In some embodiments, the adenosine deaminase comprises or consists of one, two, three, four, five, six, or seven mutations selected from L84F, A106V, D108N, H123Y, D147Y, E155V, and I156F in ecTadA SEQ ID NO: 78, or a corresponding mutation or mutations in another adenosine deaminase. In some embodiments, the adenosine deaminase comprises or consists of a L84F, A106V, D108N, H123Y, D147Y, E155V, and I156F mutation in ecTadA SEQ ID NO: 78, or corresponding mutations in another adenosine deaminase.

[0528] In some embodiments, the adenosine deaminase comprises or consists of one, two, three, four, five, six, seven, eight, nine, ten, or eleven mutations selected from H36X, R51X, L84X, A106X, D108X, H123X, S146X, D147X, E155X, I156X, and K157X in ecTadA SEQ ID NO: 78, or a corresponding mutation or mutations in another adenosine deaminase, where X indicates the presence of any amino acid other than the corresponding amino acid in the wild-type adenosine deaminase. In some embodiments, the adenosine deaminase comprises or consists of one, two, three, four, five, six, seven, eight, nine, ten, or eleven mutations selected from H36L, R51L, L84F, A106V, D108N, H123Y, S146C, D147Y, E155V, I156F, and K157N in ecTadA SEQ ID NO: 78, or a corresponding mutation or mutations in another adenosine deaminase. In some embodiments, the adenosine deaminase comprises or consists of a H36L, R51L, L84F, A106V, D108N, H123Y, S146C, D147Y, E155V, I156F, and K157N mutation in ecTadA SEQ ID NO: 78, or corresponding mutations in another adenosine deaminase.

[0529] In some embodiments, the adenosine deaminase comprises or consists of one, two, three, four, five, six, seven, eight, nine, ten, eleven, or twelve mutations selected from H36X, P48X, R51X, L84X, A106X, D108X, H123X, S146X, D147X, E155X, I156X, and K157X in ecTadA SEQ ID NO: 78, or a corresponding mutation or mutations in another adenosine deaminase, where X indicates the presence of any amino acid other than the corresponding amino acid in the wild-type adenosine deaminase. In some embodiments, the adenosine deaminase comprises or consists of one, two, three, four, five, six, seven, eight, nine, ten, eleven, or twelve mutations selected from H36L, P48S, R51L, L84F, A106V, D108N, H123Y, S146C, D147Y, E155V, I156F, and K157N in ecTadA SEQ ID NO: 78, or a corresponding mutation or mutations in another adenosine deaminase. In some embodiments, the adenosine deaminase comprises or consists of a H36L, P48S, R51L, L84F, A106V, D108N, H123Y, S146C, D147Y, E155V, I156F, and K157N mutation in ecTadA SEQ ID NO: 78, or corresponding mutations in another adenosine deaminase.

[0530] In some embodiments, the adenosine deaminase comprises or consists of one, two, three, four, five, six, seven, eight, nine, ten, eleven, twelve, or thirteen mutations selected from H36X, P48X, R51X, L84X, A106X, D108X, H123X, A142X, S146X, D147X, E155X, I156X, and K157X in ecTadA SEQ ID NO: 78, or a corresponding mutation or mutations in another adenosine deaminase, where X indicates the presence of any amino acid other than the corresponding amino acid in the wild-type adenosine deaminase. In some embodiments, the adenosine deaminase comprises or consists of one, two, three, four, five, six, seven, eight, nine, ten, eleven, twelve, or thirteen mutations selected from H36L, P48S, R51L, L84F, A106V, D108N, H123Y, A142N, S146C, D147Y, E155V, I156F, and K157N in ecTadA SEQ ID NO: 78, or a corresponding mutation or mutations in another adenosine deaminase. In some embodiments, the adenosine deaminase comprises or consists of a H36L, P48S, R51L, L84F, A106V, D108N, H123Y, A142N, S146C, D147Y, E155V, I156F, and K157N mutation in ecTadA SEQ ID NO: 78, or corresponding mutations in another adenosine deaminase.

[0531] In some embodiments, the adenosine deaminase comprises or consists of one, two, three, four, five, six, seven, eight, nine, ten, eleven, twelve, thirteen, or fourteen mutations selected from W23X, H36X, P48X, R51X, L84X, A106X, D108X, H123X, A142X, S146X, D147X, E155X, I156X, and K157X in ecTadA SEQ ID NO: 78, or a corresponding mutation or mutations in another adenosine deaminase, where X indicates the presence of any amino acid other than the corresponding amino acid in the wild-type adenosine deaminase. In some embodiments, the adenosine deaminase comprises or consists of one, two, three, four, five, six, seven, eight, nine, ten, eleven, twelve, thirteen, or fourteen mutations selected from W23L, H36L, P48A, R51L, L84F, A106V, D108N, H123Y, A142N, S146C, D147Y, E155V, I156F, and K157N in ecTadA SEQ ID NO: 78 or a corresponding mutation or mutations in another adenosine deaminase. In some embodiments, the adenosine deaminase comprises or consists of a W23L, H36L, P48A, R51L, L84F, A106V, D108N, H123Y, A142N, S146C, D147Y, E155V, I156F, and K157N mutation in ecTadA SEQ ID NO: 78, or corresponding mutations in another adenosine deaminase.

[0532] In some embodiments, the adenosine deaminase comprises or consists of one, two, three, four, five, six, seven, eight, nine, ten, eleven, twelve, thirteen, or fourteen mutations selected from W23X, H36X, P48X, R51X, L84X, A106X, D108X, H123X, S146X, D147X, R152X, E155X, I156X, and K157X in ecTadA SEQ ID NO: 78, or a corresponding mutation or mutations in another adenosine deaminase, where X indicates the presence of any amino acid other than the corresponding amino acid in the wild-type adenosine deaminase. In some embodiments, the adenosine deaminase comprises or consists of one, two, three, four, five, six, seven, eight, nine, ten, eleven, twelve, thirteen, or fourteen mutations selected from W23R, H36L, P48A, R51L, L84F, A106V, D108N, H123Y, S146C, D147Y, R152P, E155V, I156F, and K157N in ecTadA SEQ ID NO: 78, or a corresponding mutation or mutations in another adenosine deaminase. In some embodiments, the adenosine deaminase comprises or consists of a W23R, H36L, P48A, R51L, L84F, A106V, D108N, H123Y, S146C, D147Y, R152P, E155V, I156F, and K157N mutation in ecTadA SEQ ID NO: 78, or corresponding mutations in another adenosine deaminase.

[0533] In some embodiments, the adenosine deaminase comprises or consists of one, two, three, four, five, six, seven, eight, nine, ten, eleven, twelve, thirteen, fourteen, or fifteen mutations selected from W23X, H36X, P48X, R51X, L84X, A106X, D108X, H123X, A142X, S146X, D147X, R152X, E155X, I156X, and K157X in ecTadA SEQ ID NO: 78, or a corresponding mutation or mutations in another adenosine deaminase, where X indicates the presence of any amino acid other than the corresponding amino acid in the wild-type adenosine deaminase. In some embodiments, the adenosine deaminase comprises or consists of one, two, three, four, five, six, seven, eight, nine, ten, eleven, twelve, thirteen, fourteen, or fifteen mutations selected from W23L, H36L, P48A, R51L, L84F, A106V, D108N, H123Y, A142N, S146C, D147Y, R152P, E155V, I156F, and K157N in ecTadA SEQ ID NO: 78, or a corresponding mutation or mutations in another adenosine deaminase. In some embodiments, the adenosine deaminase comprises or consists of a W23L, H36L, P48A, R51L, L84F, A106V, D108N, H123Y, A142N, S146C, D147Y, R152P, E155V, I156F, and K157N mutation in ecTadA SEQ ID NO: 78, or corresponding mutations in another adenosine deaminase.

[0534] In some embodiments, the adenosine deaminase comprises one or more of the mutations provided herein corresponding to ecTadA SEQ ID NO: 78, or one or more of the corresponding mutations in another deaminase. In some embodiments, the adenosine deaminase comprises or consists of a variant of ecTadA SEQ ID NO: 78 provided herein, or the corresponding variant in another adenosine deaminase.

[0535] It should be appreciated that the adenosine deaminase (e.g., a first or second adenosine deaminase) may comprise one or more of the mutations provided in any of the adenosine deaminases (e.g., ecTadA adenosine deaminases) provided herein. In some embodiments, the adenosine deaminase comprises the combination of mutations of any of the adenosine deaminases (e.g., ecTadA adenosine deaminases) provided herein. For example, the adenosine deaminase may comprise the mutations W23R, H36L, P48A, R51L, L84F, A106V, D108N, H123Y, S146C, D147Y, R152P, E155V, I156F, and K157N (relative to ecTadA SEQ ID NO: 78), which corresponds to ABE7.10 provided herein. In some embodiments, the adenosine deaminase may comprise the mutations H36L, R51L, L84F, A106V, D108N, H123Y, S146C, D147Y, E155V, I156F, and K157N (relative to ecTadA SEQ ID NO: 78).

[0536] In some embodiments, the adenosine deaminase comprises any of the following combination of mutations relative to ecTadA SEQ ID NO: 78, where each mutation of a combination is separated by a “_” and each combination of mutations is between parentheses: (A106V_D108N), (R107C_D108N), (H8Y_D108N_S127S_D147Y_Q154H), (H8Y_R24W_D108N_N127S_D147Y_E155V), (D108N_D147Y_E155V), (H8Y_D108N_S127S), (H8Y_D108N_N127S_D147Y_Q154H), (A106V_D108N_D147Y_E155V), (D108Q_D147Y_E155V), (D108M_D147Y_E155V), (D108L_D147Y_E155V), (D108K_D147Y_E155V), (D108I_D147Y_E155V), (D108F_D147Y_E155V), (A106V_D108N_D147Y), (A106V_D108M_D147Y_E155V), (E59A_A106V_D108N_D147Y_E155V), (E59A cat dead_A106V_D108N_D147Y_E155V), (L84F_A106V_D108N_H123Y_D147Y_E155V_I156Y), (L84F_A106V_D108N_H123Y_D147Y_E155V_I156F), (D103A_D014N), (G22P_D103A_D104N), (G22P_D103A_D104N_S138A), (D103A_D104N_S138A), (R26G_L84F_A106V_R107H_D108N_H123Y_A142N_A143D_D147Y_E155V_I156F), (E25G_R26G_L84F_A106V_R107H_D108N_H123Y_A142N_A143D_D147Y_E155V_I156F), (E25D_R26G_L84F_A106V_R107K_D108N_H123Y_A142N_A143G_D147Y_E155V_I156F), (R26Q_L84F_A106V_D108N_H123Y_A142N_D147Y_E155V_I156F), (E25M_R26G_L84F_A106V_R107P_D108N_H123Y_A142N_A143D_D147Y_E155V_I156F), (R26C_L84F_A106V_R107H_D108N_H123Y_A142N_D147Y_E155V_I156F), (L84F_A106V_D108N_H123Y_A142N_A143L_D147Y_E155V_I156F), (R26G_L84F_A106V_D108N_H123Y_A142N_D147Y_E155V_I156F), (E25A_R26G_L84F_A106V_R107N_D108N_H123Y_A142N_A143E_D147Y_E155V_I156F), (R26G_L84F_A106V_R107H_D108N_H123Y_A142N_A143D_D147Y_E155V_I156F), (A106V_D108N_A142N_D147Y_E155V), (R26G_A106V_D108N_A142N_D147Y_E155V), (E25D_R26G_A106V_R107K_D108N_A142N_A143G_D147Y_E155V), (R26G_A106V_D108N_R107H_A142N_A143D_D147Y_E155V), (E25D_R26G_A106V_D108N_A142N_D147Y_E155V), (A106V_R107K_D108N_A142N_D147Y_E155V), (A106V_D108N_A142N_A143G_D147Y_E155V), (A106V_D108N_A142N_A143L_D147Y_E155V), (H36L_R51L_L84F_A106V_D108N_H123Y_S146C_D147Y_E155V_I156F_K157N), (H36L_P48S_R51L_L84F_A106V_D108N_H123Y_S146C_D147Y_E155V_I156F_K157N), (H36L_P48S_R51L_L84F_A106V_D108N_H123Y_A142N_S146C_D147Y_E155V_I156F_K157N), (W23L_H36L_P48A_R51L_L84F_A106V_D108N_H123Y_A142N_S146C_D147Y_E155V_I156F_K157N), (W23L_H36L_P48A_R51L_L84F_A106V_D108N_H123Y_A142N_S146C_D147Y_R152P_E155V_I156F_K157N), (N37T_P48T_M70L_L84F_A106V_D 108N_H123Y_D147Y_I49V_E155V_I156F), (N37S_L84F_A106V_D108N_H123Y_D147Y_E155V_I156F_K161T), (H36L_L84F_A106V_D108N_H123Y_D147Y_Q154H_E155V_I156F), (N72S_L84F_A106V_D108N_H123Y_S146R_D147Y_E155V_I156F), (H36L_P48L_L84F_A106V_D108N_H123Y_E134G_D147Y_E155V_I156F), (H36L_L84F_A106V_D108N_H123Y_D147Y_E155V_I156F_K157N), (H36L_L84F_A106V_D108N_H123Y_S146C_D147Y_E155V_I156F), (L84F_A106V_D108N_H123Y_S146R_D147Y_E155V_I156F_K161 T), (N37S_R51H_D77G_L84F_A106V_D108N_H123Y_D147Y_E155V_I156F), (R51L_L84F_A106V_D108N_H123Y_D147Y_E155V_I156F_K157N), (D24G_Q71R_L84F_H96L_A106V_D108N_H123Y_D147Y_E155V_I156F_K160E), (H36L_G67V_L84F_A106V_D108N_H123Y_S146T_D147Y_E155V_I156F), (Q71L_L84F_A106V_D108N_H123Y_L137M_A143E_D147Y_E155V_I156F), (E25G_L84F_A106V_D108N_H123Y_D147Y_E155V_I156F_Q159L), (L84F_A91T_F104I_A106V_D108N_H123Y_D147Y_E155V_I156F), (N72D_L84F_A106V_D108N_H123Y_G125A_D147Y_E155V_I156F), (P48S_L84F_S97C_A106V_D108N_H123Y_D147Y_E155V_I156F), (W23G_L84F_A106V_D108N_H123Y_D147Y_E155V_I156F), (D24G_P48L_Q71R_L84F_A106V_D108N_H123Y_D147Y_E155V_I156F_Q159L), (L84F_A106V_D108N_H123Y_A142N_D147Y_E155V_I156F), (H36L_R51L_L84F_A106V_D108N_H123Y_A142N_S146C_D147Y_E155V_I156F_K157N), (N37S_L84F_A106V_D108N_H123Y_A142N_D147Y_E155V_I156F_K161T), (L84F_A106V_D108N_D147Y_E155V_I156F), (R51L_L84F_A106V_D108N_H123Y_S146C_D147Y_E155V_I156F_K157N_K161T), (L84F_A106V_D108N_H123Y_S146C_D147Y_E155V_I156F_K161 T), (L84F_A106V_D108N_H123Y_S146C_D147Y_E155V_I156F_K157N_K160E_K161T), (L84F_A106V_D108N_H123Y_S146C_D147Y_E155V_I156F_K157N_K160E), (R74Q L84F_A106V_D108N_H123Y_D147Y_E155V_I156F), (R74A_L84F_A106V_D108N_H123Y_D147Y_E155V_I156F), (L84F_A106V_D108N_H123Y_D147Y_E155V_I156F), (R74Q_L84F_A106V_D108N_H123Y_D147Y_E155V_I156F), (L84F_R98Q_A106V_D108N_H123Y_D147Y_E155V_I156F), (L84F_A106V_D108N_H123Y_R129Q_D147Y_E155V_I156F), (P48S_L84F_A106V_D108N_H123Y_A142N_D147Y_E155V_I156F), (P48S_A142N), (P48T_I49V_L84F_A106V_D108N_H123Y_A142N_D147Y_E155V_I156F_L157N), (P48T_I49V_A142N), (H36L_P48S_R51L_L84F_A106V_D108N_H123Y_S146C_D147Y_E155V_I156F_K157N), (H36L_P48S_R51L_L84F_A106V_D108N_H123Y_S146C_A142N_D147Y_E155V_I156F_K157N), (H36L_P48T_I49V_R51L_L84F_A106V_D108N_H123Y_S146C_D147Y_E155V_I156F_K157N), (H36L_P48T_I49V_R51L_L84F_A106V_D108N_H123Y_A142N_S146C_D147Y_E155V_I156F_K157N), (H36L_P48A_R51L_L84F_A106V_D108N_H123Y_S146C_D147Y_E155V_I156F_K157N), (H36L_P48A_R51L_L84F_A106V_D108N_H123Y_A142N_S146C_D147Y_E155V_I156F_K157N), (H36L_P48A_R51L_L84F_A106V_D108N_H123Y_S146C_A142N_D147Y_E155V_I156F_K157N), (W23L_H36L_P48A_R51L_L84F_A106V_D108N_H123Y_S146C_D147Y_E155V_I156F_K157N), (W23R_H36L_P48A_R51L_L84F_A106V_D108N_H123Y_S146C_D147Y_E155V_I156F_K157N), (W23L_H36L_P48A_R51L_L84F_A106V_D108N_H123Y_S146R_D147Y_E155V_I156F_K161T), (H36L_P48A_R51L_L84F_A106V_D108N_H123Y_S146C_D147Y_R152H_E155V_I156F_K157N), (H36L_P48A_R51L_L84F_A106V_D108N_H123Y_S146C_D147Y_R152P_E155V_I156F_K157N), (W23L_H36L_P48A_R51L_L84F_A106V_D108N_H123Y_S146C_D147Y_R152P_E155V_I156F_K157N), (W23L_H36L_P48A_R51L_L84F_A106V_D108N_H123Y_A142A_S146C_D147Y_E155 V_I156F_K157N), (W23L_H36L_P48A_R51L_L84F_A106V_D108N_H123Y_A142A_S146C_D147Y_R152P_E155V_I156F_K157N), (W23L_H36L_P48A_R51L_L84F_A106V_D108N_H123Y_S146R_D147Y_E155V_I156F_K161T), (W23R_H36L_P48A_R51L_L84F_A106V_D108N_H123Y_S146C_D147Y_R152P_E155V_I156F_K157N), (H36L_P48A_R51L_L84F_A106V_D108N_H123Y_A142N_S146C_D147Y_R152P_E155V_I156F_K157N).

[0537] IV. Cytidine Deaminases (or Cytosine Deaminases)

[0538] In some embodiments, the disclosure provides base editors that comprise one or more cytidine deaminase domains. In some aspects, any of the disclosed base editors are capable of deaminating cytidine in a nucleic acid sequence (e.g., genomic DNA). As one example, any of the base editors provided herein may be base editors, (e.g., cytidine base editors).

[0539] In some embodiments, the cytidine deaminase is an apolipoprotein B mRNA-editing complex (APOBEC) family deaminase. In some embodiments, the cytidine deaminase is an APOBEC1 deaminase, an APOBEC2 deaminase, an APOBEC3A deaminase, an APOBEC3B deaminase, an APOBEC3C deaminase, an APOBEC3D deaminase, an APOBEC3F deaminase, an APOBEC3G deaminase, an APOBEC3H deaminase, or an APOBEC4 deaminase. In some embodiments, the cytidine deaminase is an activation-induced deaminase (AID). In some embodiments, the deaminase is a Lamprey CDA1 (pmCDA1) deaminase. In some embodiments, the cytidine deaminase is from a human, chimpanzee, gorilla, monkey, cow, dog, rat, or mouse. In some embodiments, the deaminase is from a human. In some embodiments the deaminase is from a rat. In some embodiments, the cytidine deaminase is a human APOBEC1 deaminase. In some embodiments, the cytidine deaminase is pmCDA1. In some embodiments, the deaminase is human APOBEC3G. In some embodiments, the deaminase is a human APOBEC3G variant. In some embodiments, the deaminase is at least 80%, at least 85%, at least 90%, at least 92%, at least 95%, at least 96%, at least 97%, at least 98%, at least 99%, or at least 99.5% identical to any one of the APOBEC amino acid sequences set forth herein.

[0540] Some exemplary suitable cytidine deaminases domains that can be fused to Cas9 domains according to aspects of this disclosure are provided below. It should be understood that the disclosure also embraces other cytidine deaminases comprising an amino acid sequence having at least 80%, at least 85%, at least 90%, at least 95%, at least 98%, at least 99%, or at least 99.5% sequence identity to one of the following exemplary cytidine deaminases:

Human AID:
(SEQ ID NO: 92)
[sequence omitted]
Mouse AID:
(SEQ ID NO: 93)
MDSLLMKQKKFLYHFKNVRWAKGRHETYLCYVVKR
RDSATSCSLDFGHLRNKSGCHVELLFLRYISDWDL
DPGRCYRVTWFTSWSPCYDCARHVAEFLRWNPNLS
LRIFTARLYFCEDRKAEPEGLRRLHRAGVQIGIMT
FKDYFYCWNTFVENRERTFKAWEGLHENSVRLTRQ
LRRILLPLYEVDDLRDAFRMLGF
Dog AID:
(SEQ ID NO: 94)
MDSLLMKQRKFLYHFKNVRWAKGRHETYLCYVVKRR
DSATSFSLDFGHLRNKSGCHVELLFLRYISDWDLD
PGRCYRVTWFTSWSPCYDCARHVADFLRGYPNLSL
RIFAARLYFCEDRKAEPEGLRRLHRAGVQIAIMTF
KDYFYCWNTFVENREKTFKAWEGLHENSVRLSRQL
RRILLPLYEVDDLRDAFRTLGL
Bovine AID:
(SEQ ID NO: 95)
MDSLLKKQRQFLYQFKNVRWAKGRHETYLCYVVKR
RDSPTSFSLDFGHLRNKAGCHVELLFLRYISDWDL
DPGRCYRVTWFTSWSPCYDCARHVADFLRGYPNLS
LRIFTARLYFCDKERKAEPEGLRRLHRAGVQIAIM
TFKDYFYCWNTFVENHERTFKAWEGLHENSVRLSR
QLRRILLPLYEVDDLRDAFRTLGL
Rat AID:
(SEQ ID NO: 96)
MAVGSKPKAALVGPHWERERIWCFLCSTGLGTQQT
GQTSRWLRPAATQDPVSPPRSLLMKQRKFLYHFKN
VRWAKGRHETYLCYVVKRRDSATSFSLDFGYLRNK
SGCHVELLFLRYISDWDLDPGRCYRVTWFTSWSPC
YDCARHVADFLRGNPNLSLRIFTARLTGWGALPAG
LMSPARPSDYFYCWNTFVENHERTFKAWEGLHENS
VRLSRRLRRILLPLYEVDDLRDAFRTLGL
Mouse APOBEC-3:
(SEQ ID NO: 97)
MGPFCLGCSHRKCYSPIRNLISQETFKFHFKNLGY
AKGRKDTFLCYEVTRKDCDSPVSLHHGVFKNKDNI
HAEICFLYWFHDKVLKVLSPREEFKITWYMSWSPC
FECAEQIVRFLATHHNLSLDIFSSRLYNVQDPETQ
QNLCRLVQEGAQVAAMDLYEFKKCWKKFVDNGGRR
FRPWKRLLTNFRYQDSKLQEILRPCYIPVPSSSSS
TLSNICLTKGLPETRFCVEGRRMDPLSEEEFYSQF
YNQRVKHLCYYHRMKPYLCYQLEQFNGQAPLKGCL
LSEKGKQHAEILFLDKIRSMELSQVTITCYLTWSP
CPNCAWQLAAFKRDRPDLILHIYTSRLYFHWKRPF
QKGLCSLWQSGILVDVMDLPQFTDCWTNFVNPKRP
FWPWKGLEIISRRTQRRLRRIKESWGLQDLVNDFG
NLQLGPPMS
Rat APOBEC-3:
(SEQ ID NO: 98)
MGPFCLGCSHRKCYSPIRNLISQETFKFHFKNLRY
AIDRKDTFLCYEVTRKDCDSPVSLHHGVFKNKDNI
HAEICFLYWFHDKVLKVLSPREEFKITWYMSWSPC
FECAEQVLRFLATHHNLSLDIFSSRLYNIRDPENQ
QNLCRLVQEGAQVAAMDLYEFKKCWKKFVDNGGRR
FRPWKKLLTNFRYQDSKLQEILRPCYIPVPSSSSS
TLSNICLTKGLPETRFCVERRRVHLLSEEEFYSQF
YNQRVKHLCYYHGVKPYLCYQLEQFNGQAPLKGCL
LSEKGKQHAEILFLDKIRSMELSQVIITCYLTWSP
CPNCAWQLAAFKRDRPDLILHIYTSRLYFHWKRPF
QKGLCSLWQSGILVDVMDLPQFTDCWTNFVNPKRP
FWPWKGLEIISRRTQRRLHRIKESWGLQDLVNDFG
NLQLGPPMS
Rhesus macaque APOBEC-3G:
(SEQ ID NO: 99)
MVEPMDPRTFVSNFNNRPILSGLNTVWLCCEVKTK
DPSGPPLDAKIFQGKVYSKAKYHPEMRFLRWFHKW
RQLHHDQEYKVTWYVSWSPCTRCANSVATFLAKDP
KVTLTIFVARLYYFWKPDYQQALRILCQKRGGPHA
TMKIMNYNEFQDCWNKFVDGRGKPFKPRNNLPKHY
TLLQATLGELLRHLMDPGTFTSNFNNKPWVSGQHE
TYLCYKVERLHNDTWVPLNQHRGFLRNQAPNIHGF
PKGRHAELCFLDLIPFWKLDGQQYRVTCFTSWSPC
FSCAQEMAKFISNNEHVSLCIFAARIYDDQGRYQE
GLRALHRDGAKIAMMNYSEFEYCWDTFVDRQGRPF
QPWDGLDEHSQALSGRLRAI
(SEQ ID NO: 100)
Chimpanzee APOBEC-3 G:
MKPHFRNPVERMYQDTFSDNFYNRPILSHRNTVWL
CYEVKTKGPSRPPLDAKIFRGQVYSKLKYHPEMRF
FHWFSKWRKLHRDQEYEVTWYISWSPCTKCTRDVA
TFLAEDPKVTLTIFVARLYYFWDPDYQEALRSLCQ
KRDGPRATMKIMNYDEFQHCWSKFVYSQRELFEPW
NNLPKYYILLHIMLGEILRHSMDPPTFTSNFNNEL
WVRGRHETYLCYEVERLHNDTWVLLNQRRGFLCNQ
APHKHGFLEGRHAELCFLDVIPFWKLDLHQDYRVT
CFTSWSPCFSCAQEMAKFISNNKHVSLCIFAARIY
DDQGRCQEGLRTLAKAGAKISIMTYSEFKHCWDTF
VDHQGCPFQPWDGLEEHSQALSGRLRAILQNQGN
Green monkey APOBEC-3G:
(SEQ ID NO: 101)
MNPQIRNMVEQMEPDIFVYYFNNRPILSGRNTVWL
CYEVKTKDPSGPPLDANIFQGKLYPEAKDHPEMKF
LHWFRKWRQLHRDQEYEVTWYVSWSPCTRCANSVA
TFLAEDPKVTLTIFVARLYYFWKPDYQQALRILCQ
ERGGPHATMKIMNYNEFQHCWNEFVDGQGKPFKPR
KNLPKHYTLLHATLGELLRHVMDPGTFTSNFNNKP
WVSGQRETYLCYKVERSHNDTWVLLNQHRGFLRNQ
APDRHGFPKGRHAELCFLDLIPFWKLDDQQYRVTC
FTSWSPCFSCAQKMAKFISNNKHVSLCIFAARIYD
DQGRCQEGLRTLHRDGAKIAVMNYSEFEYCWDTFV
DRQGRPFQPWDGLDEHSQALSGRLRAI
Human APOBEC-3 G:
(SEQ ID NO: 102)
MKPHFRNTVERMYRDTFSYNFYNRPILSRRNTVWL
CYEVKTKGPSRPPLDAKIFRGQVYSELKYHPEMRF
FHWFSKWRKLHRDQEYEVTWYISWSPCTKCTRDMA
TFLAEDPKVTLTIFVARLYYFWDPDYQEALRSLCQ
KRDGPRATMKIMNYDEFQHCWSKFVYSQRELFEPW
NNLPKYYILLHIMLGEILRHSMDPPTFTFNFNNEP
WVRGRHETYLCYEVERMHNDTWVLLNQRRGFLCNQ
APHKHGFLEGRHAELCFLDVIPFWKLDLDQDYRVT
CFTSWSPCFSCAQEMAKFISKNKHVSLCIFTARIY
DDQGRCQEGLRTLAEAGAKISIMTYSEFKHCWDTF
VDHQGCPFQPWDGLDEHSQDLSGRLRAILQNQEN
Human APOBEC-3F:
(SEQ ID NO: 103)
MKPHFRNTVERMYRDTFSYNFYNRPILSRRNTVWL
CYEVKTKGPSRPRLDAKIFRGQVYSQPEHHAEMCF
LSWFCGNQLPAYKCFQITWFVSWTPCPDCVAKLAE
FLAEHPNVTLTISAARLYYYWERDYRRALCRLSQA
GARVKIMDDEEFAYCWENFVYSEGQPFMPWYKFDD
NYAFLHRTLKEILRNPMEAMYPHIFYFHFKNLRKA
YGRNESWLCFTMEVVKHHSPVSWKRGVFRNQVDPE
THCHAERCFLSWFCDDILSPNTNYEVTWYTSWSPC
PECAGEVAEFLARHSNVNLTIFTARLYYFWDTDYQ
EGLRSLSQEGASVEIMGYKDFKYCWENFVYNDDEP
FKPWKGLKYNFLFLDSKLQEILE
Human APOBEC-3B:
(SEQ ID NO: 104)
MNPQIRNPMERMYRDTFYDNFENEPILYGRSYTWL
CYEVKIKRGRSNLLWDTGVFRGQVYFKPQYHAEMC
FLSWFCGNQLPAYKCFQITWFVSWTPCPDCVAKLA
EFLSEHPNVTLTISAARLYYYWERDYRRALCRLSQ
AGARVTIMDYEEFAYCWENFVYNEGQQFMPWYKFD
ENYAFLHRTLKEILRYLMDPDTFTFNFNNDPLVLR
RRQTYLCYEVERLDNGTWVLMDQHMGFLCNEAKNL
LCGFYGRHAELRFLDLVPSLQLDPAQIYRVTWFIS
WSPCFSWGCAGEVRAFLQENTHVRLRIFAARIYDY
DPLYKEALQMLRDAGAQVSIMTYDEFEYCWDTFVY
RQGCPFQPWDGLEEHSQALSGRLRAILQNQGN
Rat APOBEC-3B:
(SEQ ID NO: 105)
MQPQGLGPNAGMGPVCLGCSHRRPYSPIRNPLKKL
YQQTFYFHFKNVRYAWGRKNNFLCYEVNGMDCALP
VPLRQGVFRKQGHIHAELCFIYWFHDKVLRVLSPM
EEFKVTWYMSWSPCSKCAEQVARFLAAHRNLSLAI
FSSRLYYYLRNPNYQQKLCRLIQEGVHVAAMDLPE
FKKCWNKFVDNDGQPFRPWMRLRINFSFYDCKLQE
IFSRMNLLREDVFYLQFNNSHRVKPVQNRYYRRKS
YLCYQLERANGQEPLKGYLLYKKGEQHVEILFLEK
MRSMELSQVRITCYLTWSPCPNCARQLAAFKKDHP
DLILRIYTSRLYFYWRKKFQKGLCTLWRSGIHVDV
MDLPQFADCWTNFVNPQRPFRPWNELEKNSWRIQR
RLRRIKESWGL
Bovine APOBEC-3B:
(SEQ ID NO: 106)
DGWEVAFRSGTVLKAGVLGVSMTEGWAGSGHPGQG
ACVWTPGTRNTMNLLREVLFKQQFGNQPRVPAPYY
RRKTYLCYQLKQRNDLTLDRGCFRNKKQRHAEIRF
IDKINSLDLNPSQSYKIICYITWSPCPNCANELVN
FITRNNHLKLEIFASRLYFHWIKSFKMGLQDLQNA
GISVAVMTHTEFEDCWEQFVDNQSRPFQPWDKLEQ
YSASIRRRLQRILTAPI
Chimpanzee APOBEC-3B:
(SEQ ID NO: 107)
MNPQIRNPMEWMYQRTFYYNFENEPILYGRSYTWL
CYEVKIRRGHSNLLWDTGVFRGQMYSQPEHHAEMC
FLSWFCGNQLSAYKCFQITWFVSWTPCPDCVAKLA
KFLAEHPNVTLTISAARLYYYWERDYRRALCRLSQ
AGARVKIMDDEEFAYCWENFVYNEGQPFMPWYKFD
DNYAFLHRTLKEIIRHLMDPDTFTFNFNNDPLVLR
RHQTYLCYEVERLDNGTWVLMDQHMGFLCNEAKNL
LCGFYGRHAELRFLDLVPSLQLDPAQIYRVTWFIS
WSPCFSWGCAGQVRAFLQENTHVRLRIFAARIYDY
DPLYKEALQMLRDAGAQVSIMTYDEFEYCWDTFVY
RQGCPFQPWDGLEEHSQALSGRLRAILQVRASSLC
MVPHRPPPPPQSPGPCLPLCSEPPLGSLLPTGRPA
PSLPFLLTASFSFPPPASLPPLPSLSLSPGHLPVP
SFHSLTSCSIQPPCSSRIRETEGWASVSKEGRDLG
Human APOBEC-3C:
(SEQ ID NO: 108)
MNPQIRNPMKAMYPGTFYFQFKNLWEANDRNETWL
CFTVEGIKRRSVVSWKTGVFRNQVDSETHCHAERC
FLSWFCDDILSPNTKYQVTWYTSWSPCPDCAGEVA
EFLARHSNVNLTIFTARLYYFQYPCYQEGLRSLSQ
EGVAVEIMDYEDFKYCWENFVYNDNEPFKPWKGLK
TNFRLLKRRLRESLQ
Gorilla APOBEC3C:
(SEQ ID NO: 109)
MNPQIRNPMKAMYPGTFYFQFKNLWEANDRNETWL
CFTVEGIKRRSVVSWKTGVFRNQVDSETHCHAERC
FLSWFCDDILSPNTNYQVTWYTSWSPCPECAGEVA
EFLARHSNVNLTIFTARLYYFQDTDYQEGLRSLSQ
EGVAVKIMDYKDFKYCWENFVYNDDEPFKPWKGLK
YNFRFLKRRLQEILE
Human APOBEC-3 A:
(SEQ ID NO: 110)
MEASPASGPRHLMDPHIFTSNFNNGIGRHKTYLCY
EVERLDNGTSVKMDQHRGFLHNQAKNLLCGFYGRH
AELRFLDLVPSLQLDPAQIYRVTWFISWSPCFSWG
CAGEVRAFLQENTHVRLRIFAARIYDYDPLYKEAL
QMLRDAGAQVSIMTYDEFKHCWDTFVDHQGCPFQP
WDGLDEHSQALSGRLRAILQNQGN
Rhesus macaque APOBEC-3 A:
(SEQ ID NO: 111)
MDGSPASRPRHLMDPNTFTFNFNNDLSVRGRHQTY
LCYEVERLDNGTWVPMDERRGFLCNKAKNVPCGDY
GCHVELRFLCEVPSWQLDPAQTYRVTWFISWSPCF
RRGCAGQVRVFLQENKHVRLRIFAARIYDYDPLYQ
EALRTLRDAGAQVSIMTYEEFKHCWDTFVDRQGRP
FQPWDGLDEHSQALSGRLRAILQNQGN
Bovine APOBEC-3 A:
(SEQ ID NO: 112)
MDEYTFTENFNNQGWPSKTYLCYEMERLDGDATIP
LDEYKGFVRNKGLDQPEKPCHAELYFLGKIHSWNL
DRNQHYRLTCFISWSPCYDCAQKLTTFLKENHHIS
LHILASRIYTHNRFGCHQSGLCELQAAGARITIMT
FEDFKHCWETFVDHKGKPFQPWEGLNVKSQALCTE
LQAILKTQQN
Human APOBEC-3H:
(SEQ ID NO: 113)
MALLTAETFRLQFNNKRRLRRPYYPRKALLCYQLT
PQNGSTPTRGYFENKKKCHAEICFINEIKSMGLDE
TQCYQVTCYLTWSPCSSCAWELVDFIKAHDHLNLG
IFASRLYYHWCKPQQKGLRLLCGSQVPVEVMGFPK
FADCWENFVDHEKPLSFNPYKMLEELDKNSRAIKR
RLERIKIPGVRAQGRYMDILCDAEV
Rhesus macaque APOBEC-3H:
(SEQ ID NO: 114)
MALLTAKTFSLQFNNKRRVNKPYYPRKALLCYQLT
PQNGSTPTRGHLKNKKKDHAEIRFINKIKSMGLDE
TQCYQVTCYLTWSPCPSCAGELVDFIKAHRHLNLR
IFASRLYYHWRPNYQEGLLLLCGSQVPVEVMGLPE
FTDCWENFVDHKEPPSFNPSEKLEELDKNSQAIKR
RLERIKSRSVDVLENGLRSLQLGPVTPSSSIRNSR
Human APOBEC-3D:
(SEQ ID NO: 115)
MNPQIRNPMERMYRDTFYDNFENEPILYGRSYTWL
CYEVKIKRGRSNLLWDTGVFRGPVLPKRQSNHRQE
VYFRFENHAEMCFLSWFCGNRLPANRRFQITWFVS
WNPCLPCVVKVTKFLAEHPNVTLTISAARLYYYRD
RDWRWVLLRLHKAGARVKIMDYEDFAYCWENFVCN
EGQPFMPWYKFDDNYASLHRTLKEILRNPMEAMYP
HIFYFHFKNLLKACGRNESWLCFTMEVTKHHSAVF
RKRGVFRNQVDPETHCHAERCFLSWFCDDILSPNT
NYEVTWYTSWSPCPECAGEVAEFLARHSNVNLTIF
TARLCYFWDTDYQEGLCSLSQEGASVKIMGYKDFV
SCWKNFVYSDDEPFKPWKGLQTNFRLLKRRLREIL
Q
Human APOBEC-1:
(SEQ ID NO: 116)
MTSEKGPSTGDPTLRRRIEPWEFDVFYDPRELRKE
ACLLYEIKWGMSRKIWRSSGKNTTNHVEVNFIKKF
TSERDFHPSMSCSITWFLSWSPCWECSQAIREFLS
RHPGVTLVIYVARLFWHMDQQNRQGLRDLVNSGVT
IQIMRASEYYHCWRNFVNYPPGDEAHWPQYPPLWM
MLYALELHCIILSLPPCLKISRRWQNHLTFFRLHL
QNCHYQTIPPHILLATGLIHPSVAWR
Mouse APOBEC-1:
(SEQ ID NO: 117)
MSSETGPVAVDPTLRRRIEPHEFEVFFDPRELRKE
TCLLYEINWGGRHSVWRHTSQNTSNHVEVNFLEKF
TTERYFRPNTRCSITWFLSWSPCGECSRAITEFLS
RHPYVTLFIYIARLYHHTDQRNRQGLRDLISSGVT
IQIMTEQEYCYCWRNFVNYPPSNEAYWPRYPHLWV
KLYVLELYCIILGLPPCLKILRRKQPQLTFFTITL
QTCHYQRIPPHLLWATGLK
Rat APOBEC-1:
(SEQ ID NO: 118)
[sequence omitted]
Human APOBEC-2:
(SEQ ID NO: 119)
MAQKEEAAVATEAASQNGEDLENLDDPEKLKELIE
LPPFEIVTGERLPANFFKFQFRNVEYSSGRNKTFL
CYVVEAQGKGGQVQASRGYLEDEHAAAHAEEAFFN
TILPAFDPALRYNVTWYVSSSPCAACADRIIKTLS
KTKNLRLLILVGRLFMWEEPEIQAALKKLKEAGCK
LRIMKPQDFEYVWQNFVEQEEGESKAFQPWEDIQE
NFLYYEEKLADILK
Mouse APOBEC-2:
(SEQ ID NO: 120)
MAQKEEAAEAAAPASQNGDDLENLEDPEKLKELID
LPPFEIVTGVRLPVNFFKFQFRNVEYSSGRNKTFL
CYVVEVQSKGGQAQATQGYLEDEHAGAHAEEAFFN
TILPAFDPALKYNVTWYVSSSPCAACADRILKTLS
KTKNLRLLILVSRLFMWEEPEVQAALKKLKEAGCK
LRIMKPQDFEYIWQNFVEQEEGESKAFEPWEDIQE
NFLYYEEKLADILK
Rat APOBEC-2:
(SEQ ID NO: 121)
MAQKEEAAEAAAPASQNGDDLENLEDPEKLKELID
LPPFEIVTGVRLPVNFFKFQFRNVEYSSGRNKTFL
CYVVEAQSKGGQVQATQGYLEDEHAGAHAEEAFFN
TILPAFDPALKYNVTWYVSSSPCAACADRILKTLS
KTKNLRLLILVSRLFMWEEPEVQAALKKLKEAGCK
LRIMKPQDFEYLWQNFVEQEEGESKAFEPWEDIQE
NFLYYEEKLADILK
Bovine APOBEC-2:
(SEQ ID NO: 122)
MAQKEEAAAAAEPASQNGEEVENLEDPEKLKELIE
LPPFEIVTGERLPAHYFKFQFRNVEYSSGRNKTFL
CYVVEAQSKGGQVQASRGYLEDEHATNHAEEAFFN
SIMPTFDPALRYMVTWYVSSSPCAACADRIVKTLN
KTKNLRLLILVGRLFMWEEPEIQAALRKLKEAGCR
LRIMKPQDFEYIWQNFVEQEEGESKAFEPWEDIQE
NFLYYEEKLADILK
Petromyzon marinus CD Al (pmCDAl):
(SEQ ID NO: 123)
MTDAEYVRIHEKLDIYTFKKQFFNNKKSVSHRCYV
LFELKRRGERRACFWGYAVNKPQSGTERGIHAEIF
SIRKVEEYLRDNPGQFTINWYSSWSPCADCAEKIL
EWYNQELRGNGHTLKIWACKLYYEKNARNQIGLWN
LRDNGVGLNVMVSEHYQCCRKIFIQSSHNQLNENR
WLEKTLKRAEKRRSELSIMIQVKILHTTKSPAV
Human APOBEC3G D316R D317R:
(SEQ ID NO: 124)
MKPHFRNTVERMYRDTFSYNFYNRPILSRRNTVWL
CYEVKTKGPSRPPLDAKIFRGQVYSELKYHPEMRF
FHWFSKWRKLHRDQEYEVTWYISWSPCTKCTRDMA
TFLAEDPKVTLTIFVARLYYFWDPDYQEALRSLCQ
KRDGPRATMKIMNYDEFQHCWSKFVYSQRELFEPW
NNLPKYYILLHIMLGEILRHSMDPPTFTFNFNNEP
WVRGRHETYLCYEVERMHNDTWVLLNQRRGFLCNQ
APHKHGFLEGRHAELCFLDVIPFWKLDLDQDYRVT
CFTSWSPCFSCAQEMAKFISKNKHVSLCIFTARIY
RRQGRCQEGLRTLAEAGAKISIMTYSEFKHCWDTF
VDHQGCPFQPWDGLDEHSQDLSGRLRAILQNQEN
Human APOBEC3G chain A:
(SEQ ID NO: 125)
MDPPTFTFNFNNEPWVRGRHETYLCYEVERMHNDT
WVLLNQRRGFLCNQAPHKHGFLEGRHAELCFLDVI
PFWKLDLDQDYRVTCFTSWSPCFSCAQEMAKFISK
NKHVSLCIFTARIYDDQGRCQEGLRTLAEAGAKIS
IMTYSEFKHCWDTFVDHQGCPFQPWDGLDEHSQDL
SGRLRAILQ
Human APOBEC3G chain A D120R D121R:
(SEQ ID NO: 126)
MDPPTFTFNFNNEPWVRGRHETYLCYEVERMHNDT
WVLLNQRRGFLCNQAPHKHGFLEGRHAELCFLDVI
PFWKLDLDQDYRVTCFTSWSPCFSCAQEMAKFISK
NKHVSLCIFTARIYRRQGRCQEGLRTLAEAGAKIS
IMTYSEFKHCWDTFVDHQGCPFQPWDGLDEHSQDL
SGRLRAILQ

[0541] Any of the aforementioned DNA effector domains may be subjected to a continuous evolution process (e.g., PACE) or may be otherwise further evolved using a mutagenesis methodology known in the art.

[0542] In some embodiments, the cytidine deaminase is an apolipoprotein B mRNA-editing complex (APOBEC) family deaminase. In some embodiments, the deaminase is an APOBEC1 deaminase. In some embodiments, the deaminase is an APOBEC2 deaminase. In some embodiments, the deaminase is an APOBEC3 deaminase. In some embodiments, the deaminase is an APOBEC3A deaminase. In some embodiments, the deaminase is an APOBEC3B deaminase. In some embodiments, the deaminase is an APOBEC3C deaminase. In some embodiments, the deaminase is an APOBEC3D deaminase. In some embodiments, the deaminase is an APOBEC3E deaminase. In some embodiments, the deaminase is an APOBEC3F deaminase. In some embodiments, the deaminase is an APOBEC3G deaminase. In some embodiments, the deaminase is an APOBEC3H deaminase. In some embodiments, the deaminase is an APOBEC4 deaminase. In some embodiments, the deaminase is an activation-induced deaminase (AID). In some embodiments, the deaminase is a vertebrate deaminase. In some embodiments, the deaminase is an invertebrate deaminase. In some embodiments, the deaminase is a human, chimpanzee, gorilla, monkey, cow, dog, rat, or mouse deaminase. In some embodiments, the deaminase is a human deaminase. In some embodiments, the deaminase is a rat deaminase, e.g., rAPOBEC1.

[0543] Some aspects of the disclosure are based on the recognition that modulating the deaminase domain catalytic activity of any of the fusion proteins provided herein, for example by making point mutations in the deaminase domain, affect the processivity of the fusion proteins (e.g., base editors). For example, mutations that reduce, but do not eliminate, the catalytic activity of a deaminase domain within a base editing fusion protein can make it less likely that the deaminase domain will catalyze the deamination of a residue adjacent to a target residue, thereby narrowing the deamination window. The ability to narrow the deamination window may prevent unwanted deamination of residues adjacent of specific target residues, which may decrease or prevent off-target effects.

[0544] In some embodiments, any of the fusion proteins provided herein comprise a deaminase domain (e.g., a cytidine deaminase domain) that has reduced catalytic deaminase activity. In some embodiments, any of the fusion proteins provided herein comprise a deaminase domain (e.g., a cytidine deaminase domain) that has a reduced catalytic deaminase activity as compared to an appropriate control. For example, the appropriate control may be the deaminase activity of the deaminase prior to introducing one or more mutations into the deaminase. In other embodiments, the appropriate control may be a wild-type deaminase. In some embodiments, the appropriate control is a wild-type apolipoprotein B mRNA-editing complex (APOBEC) family deaminase. In some embodiments, the appropriate control is an APOBEC1 deaminase, an APOBEC2 deaminase, an APOBEC3A deaminase, an APOBEC3B deaminase, an APOBEC3C deaminase, an APOBEC3D deaminase, an APOBEC3F deaminase, an APOBEC3G deaminase, or an APOBEC3H deaminase. In some embodiments, the appropriate control is an activation induced deaminase (AID). In some embodiments, the appropriate control is a cytidine deaminase 1 from Petromyzon marinus (pmCDA1). In some embodiments, the deaminase domain may be a deaminase domain that has at least 1%, at least 5%, at least 15%, at least 20%, at least 25%, at least 30%, at least 40%, at least 50%, at least 60%, at least 70%, at least 80%, at least 90%, or at least 95% less catalytic deaminase activity as compared to an appropriate control.

[0545] The apolipoprotein B mRNA-editing complex (APOBEC) family of cytidine deaminase enzymes encompasses eleven proteins that serve to initiate mutagenesis in a controlled and beneficial manner. One family member, activation-induced cytidine deaminase (AID), is responsible for the maturation of antibodies by converting cytosines in ssDNA to uracils in a transcription-dependent, strand-biased fashion. The apolipoprotein B editing complex 3 (APOBEC3) enzyme provides protection to human cells against a certain HIV-1 strain via the deamination of cytosines in reverse-transcribed viral ssDNA. These proteins all require a Zn2+-coordinating motif (His-X-Glu-X23-26-Pro-Cys-X2-4-Cys; (SEQ ID NO: 402) and bound water molecule for catalytic activity. The Glu residue acts to activate the water molecule to a zinc hydroxide for nucleophilic attack in the deamination reaction. Each family member preferentially deaminates at its own particular “hotspot”, ranging from WRC (W is A or T, R is A or G) for hAID, to TTC for hAPOBEC3F. A recent crystal structure of the catalytic domain of APOBEC3G revealed a secondary structure comprised of a five-stranded β-sheet core flanked by six α-helices, which is believed to be conserved across the entire family. The active center loops have been shown to be responsible for both ssDNA binding and in determining “hotspot” identity. Overexpression of these enzymes has been linked to genomic instability and cancer, thus highlighting the importance of sequence-specific targeting.

[0546] Some aspects of this disclosure relate to the recognition that the activity of cytidine deaminase enzymes such as APOBEC enzymes can be directed to a specific site in genomic DNA. Without wishing to be bound by any particular theory, advantages of using Cas9 as a recognition agent include (1) the sequence specificity of Cas9 can be easily altered by simply changing the sgRNA sequence; and (2) Cas9 binds to its target sequence by denaturing the dsDNA, resulting in a stretch of DNA that is single-stranded and therefore a viable substrate for the deaminase. It should be understood that other catalytic domains, or catalytic domains from other deaminases, can also be used to generate fusion proteins with Cas9, and that the disclosure is not limited in this regard.

[0547] Some aspects of this disclosure are based on the recognition that Cas9:deaminase fusion proteins can efficiently deaminate nucleotides. In view of the results provided herein regarding the nucleotides that can be targeted by Cas9:deaminase fusion proteins, a person of skill in the art will be able to design suitable guide RNAs to target the fusion proteins to a target sequence that comprises a nucleotide to be deaminated.

[0548] In certain embodiments, the reference cytidine deaminase domain comprises a “FERNY” polypeptide having an amino acid sequence according to SEQ ID NO: 127 or an amino acid sequence that is at least 60%, 65%, 70%, 75%, 80%, 85%, 90%, 95, 98%, 99%, or 99.5% identical to SEQ ID NO: 127, as follows:

(SEQ ID NO: 127)
MFERNYDPRELRKETYLLYEIKWGKSGKLWRHWCQ
NNRTQHAEVYFLENIFNARRFNPSTHCSITWYLSW
SPCAECSQKIVDFLKEHPNVNLEIYVARLYYHEDE
RNRQGLRDLVNSGVTIRIMDLPDYNYCWKTFVSDQ
GGDEDYWPGHFAPWIKQYSLKL

[0549] In certain other embodiment, the evolved cytidine deaminase domain (i.e., as a result of the continuous evolution process described herein) comprises a “evoFERNY” polypeptide having an amino acid sequence according to SEQ ID NO: 128 or an amino acid sequence that is at least 60%, 65%, 70%, 75%, 80%, 85%, 90%, 95, 98%, 99%, or 99.5% identical to SEQ ID NO: 128, comprising an H102P and D104N substitutions, as follows:

(SEQ ID NO: 128)
MFERNYDPRELRKETYLLYEIKWGKSGKLWRHWCQ
NNRTQHAEVYFLENIFNARRFNPSTHCSITWYLSW
SPCAECSQKIVDFLKEHPNVNLEIYVARLYYPENE
RNRQGLRDLVNSGVTIRIMDLPDYNYCWKTFVSDQ
GGDEDYWPGHFAPWIKQYSLKL

[0550] In other embodiments, the reference cytidine deaminase domain comprises a “Rat APOBEC-1” polypeptide having an amino acid sequence according to SEQ ID NO: 129 or an amino acid sequence that is at least 60%, 65%, 70%, 75%, 80%, 85%, 90%, 95, 98%, 99%, or 99.5% identical to SEQ ID NO: 129, as follows:

(SEQ ID NO: 129)
[sequence omitted]

[0551] In certain other embodiment, the evolved cytidine deaminase domain (i.e., as a result of the continuous evolution process described herein) comprises a “evoAPOBEC” polypeptide having an amino acid sequence according to SEQ ID NO: 130 or an amino acid sequence that is at least 60%, 65%, 70%, 75%, 80%, 85%, 90%, 95, 98%, 99%, or 99.5% identical to SEQ ID NO: 130, and comprising substitutions E4K; H109N; H122L; D124N; R154H; A165S; P201S; F205S, as follows:

(SEQ ID NO: 130)
MSSKTGPVAVDPTLRRRIEPHEFEVFFDPRELRKE
TCLLYEINWGGRHSIWRHTSQNTNKHVEVNFIEKF
TTERYFCPNTRCSITWFLSWSPCGECSRAITEFLS
RYPNVTLFIYIARLYHLANPRNRQGLRDLISSGVT
IQIMTEQESGYCWHNFVNYSPSNESHWPRYPHLWV
RLYVLELYCIILGLPPCLNILRRKQSQLTSFTIAL
QSCHYQRLPPHILWATGLK

[0552] In still other embodiments, the reference cytidine deaminase domain comprises a “Petromyzon marinus CDA1 (pmCDA1)” polypeptide having an amino acid sequence according to SEQ ID NO: 131 or an amino acid sequence that is at least 60%, 65%, 70%, 75%, 80%, 85%, 90%, 95, 98%, 99%, or 99.5% identical to SEQ ID NO: 131, as follows:

(SEQ ID NO: 131)
MTDAEYVRIHEKLDIYTFKKQFFNNKKSVSHRCYV
LFELKRRGERRACFWGYAVNKPQSGTERGIHAEIF
SIRKVEEYLRDNPGQFTINWYSSWSPCADCAEKIL
EWYNQELRGNGHTLKIWACKLYYEKNARNQIGLWN
LRDNGVGLNVMVSEHYQCCRKIFIQSSHNQLNENR
WLEKTLKRAEKRRSELSIMIQVKILHTTKSPAV

[0553] In other embodiment, the evolved cytidine deaminase domain (i.e., as a result of the continuous evolution process described herein) comprises a “evoCDA” polypeptide having an amino acid sequence according to SEQ ID NO: 132 or an amino acid sequence that is at least 60%, 65%, 70%, 75%, 80%, 85%, 90%, 95, 98%, 99%, or 99.5% identical to SEQ ID NO: 132 and comprising substitutions F23S; A123V; I195F, as follows:

(SEQ ID NO: 132)
MTDAEYVRIHEKLDIYTFKKQFSNNKKSVSHRCYV
LFELKRRGERRACFWGYAVNKPQSGTERGIHAEIF
SIRKVEEYLRDNPGQFTINWYSSWSPCADCAEKIL
EWYNQELRGNGHTLKIWVCKLYYEKNARNQIGLWN
LRDNGVGLNVMVSEHYQCCRKIFIQSSHNQLNENR
WLEKTLKRAEKRRSELSIMFQVKILHTTKSPAV

[0554] In yet other embodiments, the reference cytidine deaminase domain comprises a “Anc689 APOBEC” polypeptide having an amino acid sequence according to SEQ ID NO: 133 or an amino acid sequence that is at least 60%, 65%, 70%, 75%, 80%, 85%, 90%, 95, 98%, 99%, or 99.5% identical to SEQ ID NO: 133, as follows:

(SEQ ID NO: 133)
MSSETGPVAVDPTLRRRIEPHEFEVFFDPRELRKE
TCLLYEIKWGTSHKIWRHSSKNTTKHVEVNFIEKF
TSERHFCPSTSCSITWFLSWSPCGECSKAITEFLS
QHPNVTLVIYVARLYHHMDQQNRQGLRDLVNSGVT
IQIMTAPEYDYCWRNFVNYPPGKEAHWPRYPPLWM
KLYALELHAGILGLPPCLNILRRKQPQLTFFTIAL
QSCHYQRLPPHILWATGLK

[0555] In other embodiments, the evolved cytidine deaminase domain (i.e., as a result of the continuous evolution process described herein) comprises a “evoAnc689 APOBEC” polypeptide having an amino acid sequence according to SEQ ID NO: 134 or an amino acid sequence that is at least 60%, 65%, 70%, 75%, 80%, 85%, 90%, 95, 98%, 99%, or 99.5% identical to SEQ ID NO: 134 and comprising substitutions E4K; H122L; D124N; R154H; A165S; P201S; F205S, as follows:

(SEQ ID NO: 134)
MSSKTGPVAVDPTLRRRIEPHEFEVFFDPRELRKE
TCLLYEIKWGTSHKIWRHSSKNTTKHVEVNFIEKF
TSERHFCPSTSCSITWFLSWSPCGECSKAITEFLS
QHPNVTLVIYVARLYHLMNQQNRQGLRDLVNSGVT
IQIMTAPEYDYCWHNFVNYPPGKESHWPRYPPLWM
KLYALELHAGILGLPPCLNILRRKQSQLTSFTIAL
QSCHYQRLPPHILWATGLK

[0556] In some aspects, the specification provides evolved cytidine deaminases which are used to construct base editors that have improved properties. For example, evolved cytidine deaminases, such as those provided herein, are capable of improving base editing efficiency and/or improving the ability of base editors to more efficiently edit bases regardless of the surrounding sequence. For example, in some aspects the disclosure provides evolved APOBEC deaminases (e.g., evolved rAPOBEC1) with improved base editing efficiency in the context of a 5′-G-3′ when it is 5′ to a target base (e.g., C). In some embodiments, the disclosure provides base editors comprising any of the evolved cytidine deaminases provided herein. It should be appreciated that any of the evolved cydidine deaminases provided herein may be used as a deaminase in a base editor protein, such as any of the base editors provided herein. It should also be appreciated that the disclosure contemplates cytidine deaminases having any of the mutations provided herein, for example any of the mutations described in the Examples section.

[0557] V. Other Functional Domains

[0558] In various embodiments, the base editors and their various components may comprise additional functional moeities, such as, but not limited to, linkers, uracil glycosylase inhibitors, nuclear localization signals, split-intein sequences (to join split proteins, such as split napDNAbps, split adenine deaminases, split cytidine deaminases, split CBEs, or split ABEs), and RNA-protein recruitment domains (such as, MS2 tagging system).

[0559] (1) Linkers

[0560] In certain embodiments, linkers may be used to link any of the protein or protein domains described herein (e.g., a deaminase domain and a Cas9 domain). The linker may be as simple as a covalent bond, or it may be a polymeric linker many atoms in length. In certain embodiments, the linker is a polypeptide or based on amino acids. In other embodiments, the linker is not peptide-like. In certain embodiments, the linker is a covalent bond (e.g., a carbon-carbon bond, disulfide bond, carbon-heteroatom bond, etc.). In certain embodiments, the linker is a carbon-nitrogen bond of an amide linkage. In certain embodiments, the linker is a cyclic or acyclic, substituted or unsubstituted, branched or unbranched aliphatic or heteroaliphatic linker. In certain embodiments, the linker is polymeric (e.g., polyethylene, polyethylene glycol, polyamide, polyester, etc.). In certain embodiments, the linker comprises a monomer, dimer, or polymer of aminoalkanoic acid. In certain embodiments, the linker comprises an aminoalkanoic acid (e.g., glycine, ethanoic acid, alanine, beta-alanine, 3-aminopropanoic acid, 4-aminobutanoic acid, 5-pentanoic acid, etc.). In certain embodiments, the linker comprises a monomer, dimer, or polymer of aminohexanoic acid (Ahx). In certain embodiments, the linker is based on a carbocyclic moiety (e.g., cyclopentane, cyclohexane). In other embodiments, the linker comprises a polyethylene glycol moiety (PEG). In other embodiments, the linker comprises amino acids. In certain embodiments, the linker comprises a peptide. In certain embodiments, the linker comprises an aryl or heteroaryl moiety. In certain embodiments, the linker is based on a phenyl ring. The linker may include functionalized moieties to facilitate attachment of a nucleophile (e.g., thiol, amino) from the peptide to the linker. Any electrophile may be used as part of the linker. Exemplary electrophiles include, but are not limited to, activated esters, activated amides, Michael acceptors, alkyl halides, aryl halides, acyl halides, and isothiocyanates.

[0561] In some embodiments, the linker is an amino acid or a plurality of amino acids (e.g., a peptide or protein). In some embodiments, the linker is a bond e.g., a covalent bond), an organic molecule, group, polymer, or chemical moiety. In some embodiments, the linker is 5-100 amino acids in length, for example, 5, 6, 7, 8, 9, 10, 11, 12, 13, 14, 15, 16, 17, 18, 19, 20, 21, 22, 23, 24, 25, 26, 27, 28, 29, 30, 31, 32, 33, 34, 35-40, 40-45, 45-50, 50-60, 60-70, 70-80, 80-90, 90-100, 100-110, 110-120, 120-130, 130-140, 140-150, or 150-200 amino acids in length. Longer or shorter linkers are also contemplated. In some embodiments, a linker comprises the amino acid sequence SGSETPGTSESATPES (SEQ ID NO: 143), which may also be referred to as the XTEN linker. In some embodiments, the linker is 32 amino acids in length. In some embodiments, the linker comprises the amino acid sequence (SGGS)₂—SGSETPGTSESATPES-(SGGS)₂ (SEQ ID NO: 144), which may also be referred to as (SGGS)₂—XTEN-(SGGS)₂ (SEQ ID NO: 144). In some embodiments, the linker comprises the amino acid sequence, wherein n is 0, 1, 2, 3, 4, 5, 6, 7, 8, 9, or 10. In some embodiments, a linker comprises the amino acid sequence SGGS (SEQ ID NO: 138). In some embodiments, a linker comprises (SGGS)ₙ (SEQ ID NO: 139), (GGGS)ₙ (SEQ ID NO: 140), (GGGGS)ₙ (SEQ ID NO: 141), (G)ₙ (SEQ ID NO: 135), (EAAAK)ₙ (SEQ ID NO: 142), (SGGS)ₙ-SGSETPGTSESATPES-(SGGS)ₙ (SEQ ID NO: 145), (GGS)ₙ (SEQ ID NO: 137), SGSETPGTSESATPES (SEQ ID NO: 143), or (XP)ₙ (SEQ ID NO: 136) motif, or a combination of any of these, wherein n is independently an integer between 1 and 30, and wherein X is any amino acid. In some embodiments, n is 1, 2, 3, 4, 5, 6, 7, 8, 9, 10, 11, 12, 13, 14, or 15. In some embodiments, a linker comprises SGSETPGTSESATPES (SEQ ID NO: 143), and SGGS (SEQ ID NO: 138). In some embodiments, a linker comprises SGGSSGSETPGTSESATPESSGGS (SEQ ID NO: 145). In some embodiments, a linker comprises SGGSSGGSSGSETPGTSESATPESSGGSSGGS (SEQ ID NO: 147). In some embodiments, a linker comprises GGSGGSPGSPAGSPTSTEEGTSESATPESGPGTSTEPSEGSAPGSPAGSPTSTEEGTSTE PSEGSAPGTSTEPSEGSAPGTSESATPESGPGSEPATSGGSGGS (SEQ ID NO: 151). In some embodiments, the linker is 24 amino acids in length. In some embodiments, the linker comprises the amino acid sequence SGGSSGGSSGSETPGTSESATPES (SEQ ID NO: 146). In some embodiments, the linker is 40 amino acids in length. In some embodiments, the linker comprises the amino acid sequence SGGSSGGSSGSETPGTSESATPESSGGSSGGSSGGSSGGS (SEQ ID NO: 148). In some embodiments, the linker is 64 amino acids in length. In some embodiments, the linker comprises the amino acid sequence SGGSSGGSSGSETPGTSESATPESSGGSSGGSSGGSSGGSSGSETPGTSESATPESSGGS SGGS (SEQ ID NO: 149). In some embodiments, the linker is 92 amino acids in length. In some embodiments, the linker comprises the amino acid sequence PGSPAGSPTSTEEGTSESATPESGPGTSTEPSEGSAPGSPAGSPTSTEEGTSTEPSEGSAP GTSTEPSEGSAPGTSESATPESGPGSEPATS (SEQ ID NO: 150). It should be appreciated that any of the linkers provided herein may be used to link a first adenosine deaminase and a second adenosine deaminase; an adenosine deaminase (e.g., a first or a second adenosine deaminase) and a napDNAbp; a napDNAbp and an NLS; or an adenosine deaminase (e.g., a first or a second adenosine deaminase) and an NLS.

[0562] In some embodiments, any of the fusion proteins provided herein, comprise an adenosine or a cytidine deaminase and a napDNAbp that are fused to each other via a linker. In some embodiments, any of the fusion proteins provided herein, comprise a first adenosine deaminase and a second adenosine deaminase that are fused to each other via a linker. In some embodiments, any of the fusion proteins provided herein, comprise an NLS, which may be fused to an adenosine deaminase (e.g., a first and/or a second adenosine deaminase), a nucleic acid programmable DNA binding protein (napDNAbp). Various linker lengths and flexibilities between an adenosine deaminase (e.g., an engineered ecTadA) and a napDNAbp (e.g., a Cas9 domain), and/or between a first adenosine deaminase and a second adenosine deaminase can be employed (e.g., ranging from very flexible linkers of the form (GGGGS)ₙ (SEQ ID NO: 141), (GGGGS)ₙ (SEQ ID NO: 141), and (G)ₙ (SEQ ID NO: 135) to more rigid linkers of the form (EAAAK)ₙ (SEQ ID NO: 142), (SGGS)ₙ (SEQ ID NO: 139), SGSETPGTSESATPES (SEQ ID NO: 143) (see, e.g., Guilinger J P, Thompson D B, Liu D R. Fusion of catalytically inactive Cas9 to FokI nuclease improves the specificity of genome modification. Nat. Biotechnol. 2014; 32(6): 577-82; the entire contents are incorporated herein by reference) and (XP)ₙ (SEQ ID NO: 136)) in order to achieve the optimal length for deaminase activity for the specific application. In some embodiments, n is 1, 2, 3, 4, 5, 6, 7, 8, 9, 10, 11, 12, 13, 14, or 15. In some embodiments, the linker comprises a (GGS)ₙ (SEQ ID NO: 137) motif, wherein n is 1, 3, or 7. In some embodiments, the adenosine deaminase and the napDNAbp, and/or the first adenosine deaminase and the second adenosine deaminase of any of the fusion proteins provided herein are fused via a linker comprising the amino acid sequence SGSETPGTSESATPES (SEQ ID NO: 143), SGGS (SEQ ID NO: 138), SGGSSGSETPGTSESATPESSGGS (SEQ ID NO: 145), SGGSSGGSSGSETPGTSESATPESSGGSSGGS (SEQ ID NO: 144), or GGSGGSPGSPAGSPTSTEEGTSESATPESGPGTSTEPSEGSAPGSPAGSPTSTEEGTSTE PSEGSAPGTSTEPSEGSAPGTSESATPESGPGSEPATSGGSGGS (SEQ ID NO: 151). In some embodiments, the linker is 24 amino acids in length. In some embodiments, the linker comprises the amino acid sequence SGGSSGGSSGSETPGTSESATPES (SEQ ID NO: 146). In some embodiments, the linker is 32 amino acids in length. In some embodiments, the linker is 32 amino acids in length. In some embodiments, the linker comprises the amino acid sequence (SGGS)₂—SGSETPGTSESATPES-(SGGS)₂ (SEQ ID NO: 144), which may also be referred to as (SGGS)₂—XTEN-(SGGS)₂ (SEQ ID NO: 144). In some embodiments, the linker comprises the amino acid sequence, wherein n is 0, 1, 2, 3, 4, 5, 6, 7, 8, 9, or 10. In some embodiments, the linker is 40 amino acids in length. In some embodiments, the linker comprises the amino acid sequence SGGSSGGSSGSETPGTSESATPESSGGSSGGSSGGSSGGS (SEQ ID NO: 148). In some embodiments, the linker is 64 amino acids in length. In some embodiments, the linker comprises the amino acid sequence SGGSSGGSSGSETPGTSESATPESSGGSSGGSSGGSSGGSSGSETPGTSESATPESSGGS SGGS (SEQ ID NO: 149). In some embodiments, the linker is 92 amino acids in length. In some embodiments, the linker comprises the amino acid sequence

(SEQ ID NO: 150)
PGSPAGSPTSTEEGTSESATPESGPGTSTEPSEGS
APGSPAGSPTSTEEGTSTEPSEGSAPGTSTEPSEG
SAPGTSESATPESGPGSEPATS.

[0563] (2) UGI Domain

[0564] In other embodiments, the base editors described herein may comprise one or more uracil glycosylase inhibitors. The term “uracil glycosylase inhibitor” or “UGI,” as used herein, refers to a protein that is capable of inhibiting a uracil-DNA glycosylase base-excision repair enzyme. In some embodiments, a UGI domain comprises a wild-type UGI or a UGI as set forth in SEQ ID NO: 163. In some embodiments, the UGI proteins provided herein include fragments of UGI and proteins homologous to a UGI or a UGI fragment. For example, in some embodiments, a UGI domain comprises a fragment of the amino acid sequence set forth in SEQ ID NO: 163. In some embodiments, a UGI fragment comprises an amino acid sequence that comprises at least 60%, at least 65%, at least 70%, at least 75%, at least 80%, at least 85%, at least 90%, at least 95%, at least 96%, at least 97%, at least 98%, at least 99%, or at least 99.5% of the amino acid sequence as set forth in SEQ ID NO: 163. In some embodiments, a UGI comprises an amino acid sequence homologous to the amino acid sequence set forth in SEQ ID NO: 163, or an amino acid sequence homologous to a fragment of the amino acid sequence set forth in SEQ ID NO: 163. In some embodiments, proteins comprising UGI or fragments of UGI or homologs of UGI or UGI fragments are referred to as “UGI variants.” A UGI variant shares homology to UGI, or a fragment thereof. For example a UGI variant is at least 70% identical, at least 75% identical, at least 80% identical, at least 85% identical, at least 90% identical, at least 95% identical, at least 96% identical, at least 97% identical, at least 98% identical, at least 99% identical, at least 99.5% identical, or at least 99.9% identical to a wild type UGI or a UGI as set forth in SEQ ID NO: 163. In some embodiments, the UGI variant comprises a fragment of UGI, such that the fragment is at least 70% identical, at least 80% identical, at least 90% identical, at least 95% identical, at least 96% identical, at least 97% identical, at least 98% identical, at least 99% identical, at least 99.5% identical, or at least 99.9% to the corresponding fragment of wild-type UGI or a UGI as set forth in SEQ ID NO: 163. In some embodiments, the UGI comprises the following amino acid sequence:

Uracil-DNA glycosylase inhibitor:
>spP14739UNGI_BPPB2
(SEQ ID NO: 163)
MTNLSDIIEKETGKQLVIQESILMLPEEVEEVIGN
KPESDILVHTAYDESTDENVMLLTSDAPEYKPWAL
VIQDSNGENKIKML.

[0565] The base editors described herein may comprise more than one UGI domain, which may be separated by one or more linkers as described herein. It will also be understood that in the context of the herein disclosed base editors, the UGI domain may be linked to a deaminase domain or

### (3) NLS Domains

[0566] In various embodiments, the PE fusion proteins may comprise one or more nuclear localization sequences (NLS), which help promote translocation of a protein into the cell nucleus. Such sequences are well-known in the art and can include the following examples:

| | | SEQ |
|---|---|---|
| | | ID |
| DESCRIPTION | SEQUENCE | NO: |
| NLS OF SV40 | PKKKRKV | 152 |
| LARGE T-AG | | |
| NLS OF | VSRKRPRP | 153 |
| POLYOMA | | |
| LARGE T-AG | | |
| NLS OF C- | PAAKRVKLD | 154 |
| MYC | | |
| NLS OF TUS- | KLKIKRPVK | 155 |
| PROTEIN | | |
| NLS OF | EGAPPAKRAR | 156 |
| HEPATITIS D | | |
| VIRUS | | |
| ANTIGEN | | |
| NLS OF | PPQPKKKPLDGE | 157 |
| MURINE P53 | | |
| NLS | MKRTADGSEFESPKKKRKV | 158 |
| NLS OF | AVKRPAATKKAGQAKKKKLD | 159 |
| NUCLEOPLASM | | |
| IN | | |
| NLS OF PEI | SGGSKRTADGSEFEPKKKRKV | 160 |
| AND PE2 | | |
| NLS OF EGL- | MSRRRKANPTKLSENAKKLAK | 161 |
| 13 | EVEN | |
| NLS | MDSLLMNRRKFLYQFKNVRW | 162 |
| | AKGRRETYLC | |

[0567] The NLS examples above are non-limiting. The PE fusion proteins may comprise any known NLS sequence, including any of those described in Cokol et al., “Finding nuclear localization signals,” EMBO Rep., 2000, 1(5): 411-415 and Freitas et al., “Mechanisms and Signals for the Nuclear Import of Proteins,” Current Genomics, 2009, 10(8): 550-7, each of which are incorporated herein by reference.

### (4) Split-Intein Domains

[0568] It will be understood that in some embodiments (e.g., delivery of a base editor in vivo using AAV particles), it may be advantageous to split a polypeptide (e.g., a deaminase or a napDNAbp) or a fusion protein (e.g., a base editor) into an N-terminal half and a C-terminal half, delivery them separately, and then allow their colocalization to reform the complete protein (or fusion protein as the case may be) within the cell. Separate halves of a protein or a fusion protein may each comprise a split-intein tag to facilitate the reformation of the complete protein or fusion protein by the mechanism of protein trans splicing.

[0569] Protein trans-splicing, catalyzed by split inteins, provides an entirely enzymatic method for protein ligation. A split-intein is essentially a contiguous intein (e.g. a mini-intein) split into two pieces named N-intein and C-intein, respectively. The N-intein and C-intein of a split intein can associate non-covalently to form an active intein and catalyze the splicing reaction essentially in same way as a contiguous intein does. Split inteins have been found in nature and also engineered in laboratories. As used herein, the term “split intein” refers to any intein in which one or more peptide bond breaks exists between the N-terminal and C-terminal amino acid sequences such that the N-terminal and C-terminal sequences become separate molecules that can non-covalently reassociate, or reconstitute, into an intein that is functional for trans-splicing reactions. Any catalytically active intein, or fragment thereof, may be used to derive a split intein for use in the methods of the invention. For example, in one aspect the split intein may be derived from a eukaryotic intein. In another aspect, the split intein may be derived from a bacterial intein. In another aspect, the split intein may be derived from an archaeal intein. Preferably, the split intein so-derived will possess only the amino acid sequences essential for catalyzing trans-splicing reactions.

[0570] As used herein, the “N-terminal split intein (In)” refers to any intein sequence that comprises an N-terminal amino acid sequence that is functional for trans-splicing reactions. An In thus also comprises a sequence that is spliced out when trans-splicing occurs. An In can comprise a sequence that is a modification of the N-terminal portion of a naturally occurring intein sequence. For example, an In can comprise additional amino acid residues and/or mutated residues so long as the inclusion of such additional and/or mutated residues does not render the In non-functional in trans-splicing. Preferably, the inclusion of the additional and/or mutated residues improves or enhances the trans-splicing activity of the In.

[0571] As used herein, the “C-terminal split intein (Ic)” refers to any intein sequence that comprises a C-terminal amino acid sequence that is functional for trans-splicing reactions. In one aspect, the Ic comprises 4 to 7 contiguous amino acid residues, at least 4 amino acids of which are from the last β-strand of the intein from which it was derived. An Ic thus also comprises a sequence that is spliced out when trans-splicing occurs. An Ic can comprise a sequence that is a modification of the C-terminal portion of a naturally occurring intein sequence. For example, an Ic can comprise additional amino acid residues and/or mutated residues so long as the inclusion of such additional and/or mutated residues does not render the In non-functional in trans-splicing. Preferably, the inclusion of the additional and/or mutated residues improves or enhances the trans-splicing activity of the Ic.

[0572] In some embodiments of the invention, a peptide linked to an Ic or an In can comprise an additional chemical moiety including, among others, fluorescence groups, biotin, polyethylene glycol (PEG), amino acid analogs, unnatural amino acids, phosphate groups, glycosyl groups, radioisotope labels, and pharmaceutical molecules. In other embodiments, a peptide linked to an Ic can comprise one or more chemically reactive groups including, among others, ketone, aldehyde, Cys residues and Lys residues. The N-intein and C-intein of a split intein can associate non-covalently to form an active intein and catalyze the splicing reaction when an “intein-splicing polypeptide (ISP)” is present. As used herein, “intein-splicing polypeptide (ISP)” refers to the portion of the amino acid sequence of a split intein that remains when the Ic, In, or both, are removed from the split intein. In certain embodiments, the In comprises the ISP. In another embodiment, the Ic comprises the ISP. In yet another embodiment, the ISP is a separate peptide that is not covalently linked to In nor to Ic.

[0573] Split inteins may be created from contiguous inteins by engineering one or more split sites in the unstructured loop or intervening amino acid sequence between the −12 conserved beta-strands found in the structure of mini-inteins. Some flexibility in the position of the split site within regions between the beta-strands may exist, provided that creation of the split will not disrupt the structure of the intein, the structured beta-strands in particular, to a sufficient degree that protein splicing activity is lost.

[0574] In protein trans-splicing, one precursor protein consists of an N-extein part followed by the N-intein, another precursor protein consists of the C-intein followed by a C-extein part, and a trans-splicing reaction (catalyzed by the N- and C-inteins together) excises the two intein sequences and links the two extein sequences with a peptide bond. Protein trans-splicing, being an enzymatic reaction, can work with very low (e.g. micromolar) concentrations of proteins and can be carried out under physiological conditions.

### (5) RNA-Protein Recruitment System

[0575] In various embodiments, two separate protein domains (e.g., a Cas9 domain and a cytidine deaminase domain) may be colocalized to one another to form a functional complex (akin to the function of a fusion protein comprising the two separate protein domains) by using an “RNA-protein recruitment system,” such as the “MS2 tagging technique.” Such systems generally tag one protein domain with an “RNA-protein interaction domain” (aka “RNA-protein recruitment domain”) and the other with an “RNA-binding protein” that specifically recognizes and binds to the RNA-protein interaction domain, e.g., a specific hairpin structure. These types of systems can be leveraged to colocalize the domains of a base editor, as well as to recruitment additional functionalities to a base editor, such as a UGI domain. In one example, the MS2 tagging technique is based on the natural interaction of the MS2 bacteriophage coat protein (“MCP” or “MS2cp”) with a stem-loop or hairpin structure present in the genome of the phage, i.e., the “MS2 hairpin.” In the case of the MS2 hairpin, it is recognized and bound by the MS2 bacteriophage coat protein (MCP). Thus, in one exemplary scenario a deaminase-MS2 fusion can recruit a Cas9-MCP fusion.

[0576] A review of other modular RNA-protein interaction domains are described in the art, for example, in Johansson et al., “RNA recognition by the MS2 phage coat protein,” Sem Virol., 1997, Vol. 8(3): 176-185; Delebecque et al., “Organization of intracellular reactions with rationally designed RNA assemblies,” Science, 2011, Vol. 333: 470-474; Mali et al., “Cas9 transcriptional activators for target specificity screening and paired nickases for cooperative genome engineering,” Nat. Biotechnol., 2013, Vol. 31: 833-838; and Zalatan et al., “Engineering complex synthetic transcriptional programs with CRISPR RNA scaffolds,” Cell, 2015, Vol. 160: 339-350, each of which are incorporated herein by reference in their entireties. Other systems include the PP7 hairpin, which specifically recruits the PCP protein, and the “com” hairpin, which specifically recruits the Com protein. See Zalatan et al.

[0577] The nucleotide sequence of the MS2 hairpin (or equivalently referred to as the “MS2 aptamer”) is: GCCAACATGAGGATCACCCATGTCTGCAGGGCC (SEQ ID NO: 172).

[0578] The amino acid sequence of the MCP or MS2cp is:

(SEQ ID NO: 173)
GSASNFTQFVLVDNGGTGDVTVAPSNFANGVAEWISSNSR
SQAYKVTCSVRQSSAQNRKYTIKVEVPKVATQTVGGEELP
VAGWRSYLNMELTIPIFATNSDCELIVKAMQGLLKDGNPI
PSAIAANSGIY.

[0579] VI. Base Editors

[0580] In various aspects, the instant specification provides base editors and methods of using the same, along with a suitable guide RNA, to edit target DNA in a manner predicted by the herein disclosed computational modes by installing precise nucleobase changes in target sequences.

[0581] The state of the art has described numerous base editors as of this filing. It will be understood that the methods and approaches herein described for editing the gene loci may be applied to any previously known base editor, or to base editors that may be developed or evolved in the future.

[0582] Exemplary base editors that may be used in accordance with the present disclosure include those described in the following references and/or patent publications, each of which are incorporated by reference in their entireties: (a) PCT/US2014/070038 (published as WO2015/089406, Jun. 18, 2015) and its equivalents in the US or around the world; (b) PCT/US2016/058344 (published as WO2017/070632, Apr. 27, 2017) and its equivalents in the US or around the world; (c) PCT/US2016/058345 (published as WO2017/070633, April 27. 2017) and its equivalent in the US or around the world; (d) PCT/US2017/045381 (published as WO2018/027078, Feb. 8, 2018) and its equivalents in the US or around the world; (e) PCT/US2017/056671 (published as WO2018/071868, Apr. 19, 2018) and its equivalents in the US or around the world; PCT/2017/048390 (WO2017/048390, Mar. 23, 2017) and its equivalents in the US or around the world; (f) PCT/US2017/068114 (not published) and its equivalents in the US or around the world; (g) PCT/US2017/068105 (not published) and its equivalents in the US or around the world; (h) PCT/US2017/046144 (WO2018/031683, Feb. 15, 2018) and its equivalents in the US or around the world; (i) PCT/US2018/024208 (not published) and its equivalents in the US or around the world; (j) PCT/2018/021878 (WO2018/021878, Feb. 1, 2018) and its equivalents in the US and around the world; (k) Komor, A. C., Kim, Y. B., Packer, M. S., Zuris, J. A. & Liu, D. R. Programmable editing of a target base in genomic DNA without double-stranded DNA cleavage. Nature 533, 420-(2016); (1) Gaudelli, N. M. et al. Programmable base editing of A.T to G.C in genomic DNA without DNA cleavage. Nature 551, 464- (2017); (m) any of the references listed in this specification entitled “References” and which reports or describes a base editor known in the art.

[0583] In various aspects, the improved or modified base editors described herein have the following generalized structures:
[0584] [A]-[B] or [B]-[A],

[0585] wherein [A] is a napDNAbp and [B] is nucleic acid effector domain (e.g., an adenosine deaminase, or cytidine deaminase), and “]-[” represents an optional a linker that joins the [A] and [B] domains together, either covalently or non-covalently.

[0586] Such base editors may also comprising one or more additional functional moieties, [C], such as UGI domains or NLS domains, joined optionally through a linker to [A] and/or [B].

[0587] In some embodiments, the base editors provided herein can be made as a recombinant fusion protein comprising one or more protein domains, thereby generating a base editor. In certain embodiments, the base editors provided herein comprise one or more features that improve the base editing activity (e.g., efficiency, selectivity, and/or specificity) of the base editor proteins. For example, the base editor proteins provided herein may comprise a Cas9 domain that has reduced nuclease activity. In some embodiments, the base editor proteins provided herein may have a Cas9 domain that does not have nuclease activity (dCas9), or a Cas9 domain that cuts one strand of a duplexed DNA molecule, referred to as a Cas9 nickase (nCas9). Without wishing to be bound by any particular theory, the presence of the catalytic residue (e.g., H840) maintains the activity of the Cas9 to cleave the non-edited (e.g., non-deaminated) strand containing a T opposite the targeted A. Mutation of the catalytic residue (e.g., D10 to A10) of Cas9 prevents cleavage of the edited strand containing the targeted A residue. Such Cas9 variants are able to generate a single-strand DNA break (nick) at a specific location based on the gRNA-defined target sequence, leading to repair of the non-edited strand, ultimately resulting in a T to C change on the non-edited strand.

[0588] In particular, the disclosure provides adenosine base editors that can be used to correct a mutation or install a genetic change. Exemplary domains used in base editing fusion proteins, including adenosine deaminases, napDNA/RNAbp (e.g., Cas9), and nuclear localization sequences (NLSs) are described in further detail below.

[0589] Some aspects of the disclosure provide fusion proteins comprising a nucleic acid programmable DNA binding protein (napDNAbp) and an adenosine deaminase. In some embodiments, any of the fusion proteins provided herein is a base editor. In some embodiments, the napDNAbp is a Cas9 domain, a Cpf1 domain, a CasX domain, a CasY domain, a C2c1 domain, a C2c2 domain, aC2c3 domain, or an Argonaute domain. In some embodiments, the napDNAbp is any napDNAbp provided herein. Some aspects of the disclosure provide fusion proteins comprising a Cas9 domain and an adenosine deaminase. The Cas9 domain may be any of the Cas9 domains or Cas9 proteins (e.g., dCas9 or nCas9) provided herein. In some embodiments, any of the Cas9 domains or Cas9 proteins (e.g., dCas9 or nCas9) provided herein may be fused with any of the deaminases provided herein. In some embodiments, the fusion protein comprises the structure:
[0590] NH₂-[deaminase]-[napDNAbp]-COOH; or
[0591] NH₂-[napDNAbp]-[deaminase]-COOH

[0592] In some embodiments, the fusion proteins comprising an deaminase and a napDNAbp (e.g., Cas9 domain) do not include a linker sequence. In some embodiments, a linker is present between the deaminase domain and the napDNAbp. In some embodiments, the “]-[” used in the general architecture above indicates the presence of an optional linker. In some embodiments, the deaminase and the napDNAbp are fused via any of the linkers provided herein. For example, in some embodiments the deaminase and the napDNAbp are fused via any of the linkers provided below in the section entitled “Linkers”. In some embodiments, the deaminase and the napDNAbp are fused via a linker that comprises between 1 and 200 amino acids. In some embodiments, the adenosine deaminase and the napDNAbp are fused via a linker that comprises from 1 to 5, 1 to 10, 1 to 20, 1 to 30, 1 to 40, 1 to 50, 1 to 60, 1 to 80, 1 to 100, 1 to 150, 1 to 200, 5 to 10, 5 to 20, 5 to 30, 5 to 40, 5 to 60, 5 to 80, 5 to 100, 5 to 150, 5 to 200, 10 to 20, 10 to 30, 10 to 40, 10 to 50, 10 to 60, 10 to 80, 10 to 100, 10 to 150, 10 to 200, 20 to 30, 20 to 40, 20 to 50, 20 to 60, 20 to 80, 20 to 100, 20 to 150, 20 to 200, 30 to 40, 30 to 50, 30 to 60, 30 to 80, 30 to 100, 30 to 150, 30 to 200, 40 to 50, 40 to 60, 40 to 80, 40 to 100, 40 to 150, 40 to 200, 50 to 60 50 to 80, 50 to 100, 50 to 150, 50 to 200, 60 to 80, 60 to 100, 60 to 150, 60 to 200, 80 to 100, 80 to 150, 80 to 200, 100 to 150, 100 to 200, or 150 to 200 amino acids in length. In some embodiments, the adenosine deaminase and the napDNAbp are fused via a linker that comprises 3, 4, 16, 24, 32, 64, 100, or 104 amino acids in length.

[0593] In some embodiments, the based editors provided herein further comprise one or more nuclear targeting sequences, for example, a nuclear localization sequence (NLS). In some embodiments, a NLS comprises an amino acid sequence that facilitates the importation of a protein, that comprises an NLS, into the cell nucleus (e.g., by nuclear transport). In some embodiments, any of the fusion proteins provided herein further comprise a nuclear localization sequence (NLS). In some embodiments, the NLS is fused to the N-terminus of the fusion protein. In some embodiments, the NLS is fused to the C-terminus of the fusion protein. In some embodiments, the NLS is fused to the N-terminus of the napDNAbp. In some embodiments, the NLS is fused to the C-terminus of the napDNAbp. In some embodiments, the NLS is fused to the N-terminus of the adenosine deaminase. In some embodiments, the NLS is fused to the C-terminus of the adenosine deaminase. In some embodiments, the NLS is fused to the fusion protein via one or more linkers. In some embodiments, the NLS is fused to the fusion protein without a linker. In some embodiments, the NLS comprises an amino acid sequence of any one of the NLS sequences provided or referenced herein. In some embodiments, the NLS comprises an amino acid sequence as set forth in any one of SEQ ID NOs: 152-162. Additional nuclear localization sequences are known in the art and would be apparent to the skilled artisan. For example, NLS sequences are described in Plank et al., PCT/EP2000/011690, the contents of which are incorporated herein by reference for their disclosure of exemplary nuclear localization sequences.

[0594] In some embodiments, the general architecture of exemplary fusion proteins with an deaminase and a napDNAbp comprises any one of the following structures, where NLS is a nuclear localization sequence (e.g., any NLS provided herein), NH₂ is the N-terminus of the fusion protein, and COOH is the C-terminus of the fusion protein. Fusion proteins comprising an adenosine deaminase, a napDNAbp, and a NLS:
[0595] NH₂-[NLS]-[deaminase]-[napDNAbp]-COOH;
[0596] NH₂-[deaminase]-[NLS]-[napDNAbp]-COOH;
[0597] NH₂-[deaminase]-[napDNAbp]-[NLS]-COOH;
[0598] NH₂-[NLS]-[napDNAbp]-[deaminase]-COOH;
[0599] NH₂-[napDNAbp]-[NLS]-[deaminase]-COOH; and
[0600] NH₂-[napDNAbp]-[deaminase]-[NLS]-COOH.

[0601] Some aspects of the disclosure provide ABEs (adenine base editors) that comprise a nucleic acid programmable DNA binding protein (napDNAbp) and at least two adenosine deaminase domains. Without wishing to be bound by any particular theory, dimerization of adenosine deaminases (e.g., in cis or in trans) may improve the ability (e.g., efficiency) of the fusion protein to modify a nucleic acid base, for example to deaminate adenine. In some embodiments, any of the fusion proteins may comprise 2, 3, 4 or 5 adenosine deaminase domains. In some embodiments, any of the fusion proteins provided herein comprise two adenosine deaminases. In some embodiments, any of the fusion proteins provided herein contain only two adenosine deaminases. In some embodiments, the adenosine deaminases are the same. In some embodiments, the adenosine deaminases are any of the adenosine deaminases provided herein. In some embodiments, the adenosine deaminases are different. In some embodiments, the first adenosine deaminase is any of the adenosine deaminases provided herein, and the second adenosine is any of the adenosine deaminases provided herein, but is not identical to the first adenosine deaminase. As one example, the fusion protein may comprise a first adenosine deaminase and a second adenosine deaminase that both comprise the amino acid sequence of SEQ ID NO: 91, which contains a W23R; H36L; P48A; R51L; L84F; A106V; D108N; H123Y; S146C; D147Y; R152P; E155V; I156F; and K157N mutation from ecTadA (SEQ ID NO: 89). In some embodiments, the fusion protein may comprise a first adenosine deaminase that comprises the amino acid sequence, e.g., of SEQ ID NO: 89, and a second adenosine deaminase domain that comprises the amino amino acid sequence of TadA7.10 of SEQ ID NO: 79. Additional fusion protein constructs comprising two adenosine deaminase domains are illustrated herein and are provided in the art.

[0602] In some embodiments, the fusion protein comprises two adenosine deaminases (e.g., a first adenosine deaminase and a second adenosine deaminase). In some embodiments, the fusion protein comprises a first adenosine deaminase and a second adenosine deaminase. In some embodiments, the first adenosine deaminase is N-terminal to the second adenosine deaminase in the fusion protein. In some embodiments, the first adenosine deaminase is C-terminal to the second adenosine deaminase in the fusion protein. In some embodiments, the first adenosine deaminase and the second deaminase are fused directly or via a linker. In some embodiments, the linker is any of the linkers provided herein, for example, any of the linkers described in the “Linkers” section.

[0603] In some embodiments, the first adenosine deaminase is the same as the second adenosine deaminase. In some embodiments, the first adenosine deaminase and the second adenosine deaminase are any of the adenosine deaminases described herein. In some embodiments, the first adenosine deaminase and the second adenosine deaminase are different. In some embodiments, the first adenosine deaminase is any of the adenosine deaminases provided herein. In some embodiments, the second adenosine deaminase is any of the adenosine deaminases provided herein but is not identical to the first adenosine deaminase. In some embodiments, the first adenosine deaminase is an ecTadA adenosine deaminase. In some embodiments, the first adenosine deaminase comprises an amino acid sequence that is at least 60%, at least 65%, at least 70%, at least 75%, at least 80%, at least 85%, at least 90%, at least 95%, at least 96%, at least 97%, at least 98%, at least 99%, or at least 99.5% identical to any one of the amino acid sequences set forth in any one of SEQ ID NOs: 78-91, and 403-404, or to any of the adenosine deaminases provided herein. In some embodiments, the first adenosine deaminase comprises an amino acid sequence, e.g., of SEQ ID NO: 78-91, and 403-404. In some embodiments, the second adenosine deaminase comprises an amino acid sequence that is at least 60%, at least 65%, at least 70%, at least 75%, at least 80%, at least 85%, at least 90%, at least 95%, at least 96%, at least 97%, at least 98%, at least 99%, or at least 99.5% identical to any one of the amino acid sequences set forth in any one of SEQ ID NOs: 78-91, and 403-404, or to any of the deaminases provided herein. The amino acid sequences can be the same or different. In some embodiments, the second adenosine deaminase comprises an amino acid sequence of any one of SEQ ID NOs: 78-91, and 403-404.

[0604] In some embodiments, the general architecture of exemplary fusion proteins with a first adenosine deaminase, a second adenosine deaminase, and a napDNAbp comprises any one of the following structures, where NLS is a nuclear localization sequence (e.g., any NLS provided herein), NH₂ is the N-terminus of the fusion protein, and COOH is the C-terminus of the fusion protein.

[0605] Thus, in some embodiments, the disclosure provides based editors comprising a first adenosine deaminase, a second adenosine deaminase, and a napDNAbp, such as: NH₂-[first adenosine deaminase]-[second adenosine deaminase]-[napDNAbp]-COOH; NH₂-[first adenosine deaminase]-[napDNAbp]-[second adenosine deaminase]-COOH; NH₂-[napDNAbp]-[first adenosine deaminase]-[second adenosine deaminase]-COOH; NH₂-[second adenosine deaminase]-[first adenosine deaminase]-[napDNAbp]-COOH; NH₂-[second adenosine deaminase]-[napDNAbp]-[first adenosine deaminase]-COOH; NH₂-[napDNAbp]-[second adenosine deaminase]-[first adenosine deaminase]-COOH;

[0606] In some embodiments, the fusion proteins provided herein do not comprise a linker. In some embodiments, a linker is present between one or more of the domains or proteins (e.g., first adenosine deaminase, second adenosine deaminase, and/or napDNAbp). In some embodiments, the “-” used in the general architecture above indicates the presence of an optional linker.

[0607] In other embodiments, the disclosure provides based editors comprising a first adenosine deaminase, a second adenosine deaminase, a napDNAbp, and an NLS, such as: NH₂-[NLS]-[first adenosine deaminase]-[second adenosine deaminase]-[napDNAbp]-COOH; NH₂-[first adenosine deaminase]-[NLS]-[second adenosine deaminase]-[napDNAbp]-COOH; NH₂-[first adenosine deaminase]-[second adenosine deaminase]-[NLS]-[napDNAbp]-COOH; NH₂-[first adenosine deaminase]-[second adenosine deaminase]-[napDNAbp]-[NLS]-COOH; NH₂-[NLS]-[first adenosine deaminase]-[napDNAbp]-[second adenosine deaminase]-COOH; NH₂-[first adenosine deaminase]-[NLS]-[napDNAbp]-[second adenosine deaminase]-COOH; NH₂-[first adenosine deaminase]-[napDNAbp]-[NLS]-[second adenosine deaminase]-COOH; NH₂-[first adenosine deaminase]-[napDNAbp]-[second adenosine deaminase]-[NLS]-COOH; NH₂-[NLS]-[napDNAbp]-[first adenosine deaminase]-[second adenosine deaminase]-COOH; NH₂-[napDNAbp]-[NLS]-[first adenosine deaminase]-[second adenosine deaminase]-COOH; NH₂-[napDNAbp]-[first adenosine deaminase]-[NLS]-[second adenosine deaminase]-COOH; NH₂-[napDNAbp]-[first adenosine deaminase]-[second adenosine deaminase]-[NLS]-COOH; NH₂-[NLS]-[second adenosine deaminase]-[first adenosine deaminase]-[napDNAbp]-COOH; NH₂-[second adenosine deaminase]-[NLS]-[first adenosine deaminase]-[napDNAbp]-COOH; NH₂-[second adenosine deaminase]-[first adenosine deaminase]-[NLS]-[napDNAbp]-COOH; NH₂-[second adenosine deaminase]-[first adenosine deaminase]-[napDNAbp]-[NLS]-COOH; NH₂-[NLS]-[second adenosine deaminase]-[napDNAbp]-[first adenosine deaminase]-COOH; NH₂-[second adenosine deaminase]-[NLS]-[napDNAbp]-[first adenosine deaminase]-COOH; NH₂-[second adenosine deaminase]-[napDNAbp]-[NLS]-[first adenosine deaminase]-COOH; NH₂-[second adenosine deaminase]-[napDNAbp]-[first adenosine deaminase]-[NLS]-COOH; NH₂-[NLS]-[napDNAbp]-[second adenosine deaminase]-[first adenosine deaminase]-COOH; NH₂-[napDNAbp]-[NLS]-[second adenosine deaminase]-[first adenosine deaminase]-COOH; NH₂-[napDNAbp]-[second adenosine deaminase]-[NLS]-[first adenosine deaminase]-COOH; NH₂-[napDNAbp]-[second adenosine deaminase]-[first adenosine deaminase]-[NLS]-COOH;

[0608] In some embodiments, the fusion proteins provided herein do not comprise a linker. In some embodiments, a linker is present between one or more of the domains or proteins (e.g., first adenosine deaminase, second adenosine deaminase, napDNAbp, and/or NLS). In some embodiments, the “-” used in the general architecture above indicates the presence of an optional linker.

[0609] It should be appreciated that the fusion proteins of the present disclosure may comprise one or more additional features. For example, in some embodiments, the fusion protein may comprise cytoplasmic localization sequences, export sequences, such as nuclear export sequences, or other localization sequences, as well as sequence tags that are useful for solubilization, purification, or detection of the fusion proteins. Suitable protein tags provided herein include, but are not limited to, biotin carboxylase carrier protein (BCCP) tags, myc-tags, calmodulin-tags, FLAG-tags, hemagglutinin (HA)-tags, polyhistidine tags, also referred to as histidine tags or His-tags, maltose binding protein (MBP)-tags, nus-tags, glutathione-S-transferase (GST)-tags, green fluorescent protein (GFP)-tags, thioredoxin-tags, S-tags, Softags (e.g., Softag 1, Softag 3), strep-tags, biotin ligase tags, FlAsH tags, V5 tags, and SBP-tags. Additional suitable sequences will be apparent to those of skill in the art. In some embodiments, the fusion protein comprises one or more His tags.

Base Editors Used in Training BE-Hive in Connection with Example 1

[0610] The following CBEs were used to generate training data for the BE-Hive algorithm of Example 1. Each of the CBEs have the same architecture of [NLS]-[deaminase]-[Cas9]-[UGI]-[UGI]-[NLS] (which is the BE4max architecture) and with interchangeable deaminases.

[0611] In addition, Cas-protein components of these editors can include SpCas9, SpCas9 circular permutant 1028, or Cas9-NG. Amino acid sequences are provided for the BE4 (BE4max) construct as an example, and separately amino acid sequences for deaminases and Cas9 proteins are provided below.

| | | SEQ ID |
|---|---|---|
| DESCRIPTION | SEQUENCE | NO: |
| BE4max (or BE4) | MKRTADGSEFESPKKKRKVSSETGPVAVDPTLRRRIEPHEFEVFFDPRELRKETCLLYE | 3200 |
| Cas9 = SpCas9 | INWGGRHSIWRHTSQNTNKHVEVNFIEKFTTERYFCPNTRCSITWFLSWSPCGECSRAI | |
| | TEFLSRYPHVTLFIYIARLYHHADPRNRQGLRDLISSGVTIQIMTEQESGYCWRNFVNY | |
| | SPSNEAHWPRYPHLWVRLYVLELYCIILGLPPCLNILRRKQPQLTFFTIALQSCHYQRL | |
| | PPHILWATGLKSGGSSGGSSGSETPGTSESATPESSGGSSGGDKKYSIGLAIGTNSVGW | |
| | AVITDEYKVPSKKFKVLGNTDRHSIKKNLIGALLFDSGETAEATRLKRTARRRYTRRKN | |
| | RICYLQEIFSNEMAKVDDSFFHRLEESFLVEEDKKHERHPIFGNIVDEVAYHEKYPTIY | |
| | HLRKKLVDSTDKADLRLIYLALAHMIKFRGHFLIEGDLNPDNSDVDKLFIQLVQTYNQL | |
| | FEENPINASGVDAKAILSARLSKSRRLENLIAQLPGEKKNGLFGNLIALSLGLTPNFKS | |
| | NFDLAEDAKLQLSKDTYDDDLDNLLAQIGDQYADLFLAAKNLSDAILLSDILRVNTEIT | |
| | KAPLSASMIKRYDEHHQDLTLLKALVRQQLPEKYKEIFFDQSKNGYAGYIDGGASQEEF | |
| | YKFIKPILEKMDGTEELLVKLNREDLLRKQRTFDNGSIPHQIHLGELHAILRRQEDFYP | |
| | FLKDNREKIEKILTFRIPYYVGPLARGNSRFAWMTRKSEETITPWNFEEVVDKGASAQS | |
| | FIERMTNFDKNLPNEKVLPKHSLLYEYFTVYNELTKVKYVTEGMRKPAFLSGEQKKAIV | |
| | DLLFKTNRKVTVKQLKEDYFKKIECFDSVEISGVEDRFNASLGTYHDLLKIIKDKDFLD | |
| | NEENEDILEDIVLTLTLFEDREMIEERLKTYAHLFDDKVMKQLKRRRYTGWGRLSRKLI | |
| | NGIRDKQSGKTILDFLKSDGFANRNFMQLIHDDSLTFKEDIQKAQVSGQGDSLHEHIAN | |
| | LAGSPAIKKGILQTVKVVDELVKVMGRHKPENIVIEMARENQTTQKGQKNSRERMKRIE | |
| | EGIKELGSQILKEHPVENTQLQNEKLYLYYLQNGRDMYVDQELDINRLSDYDVDHIVPQ | |
| | SFLKDDSIDNKVLTRSDKNRGKSDNVPSEEVVKKMKNYWRQLLNAKLITQRKFDNLTKA | |
| | ERGGLSELDKAGFIKRQLVETRQITKHVAQILDSRMNTKYDENDKLIREVKVITLKSKL | |
| | VSDFRKDFQFYKVREINNYHHAHDAYLNAVVGTALIKKYPKLESEFVYGDYKVYDVRKM | |
| | IAKSEQEIGKATAKYFFYSNIMNFFKTEITLANGEIRKRPLIETNGETGEIVWDKGRDF | |
| | ATVRKVLSMPQVNIVKKTEVQTGGFSKESILPKRNSDKLIARKKDWDPKKYGGFDSPTV | |
| | AYSVLVVAKVEKGKSKKLKSVKELLGITIMERSSFEKNPIDFLEAKGYKEVKKDLIIKL | |
| | PKYSLFELENGRKRMLASAGELQKGNELALPSKYVNFLYLASHYEKLKGSPEDNEQKQL | |
| | FVEQHKHYLDEIIEQISEFSKRVILADANLDKVLSAYNKHRDKPIREQAENIIHLFTLT | |
| | NLGAPAAFKYFDTTIDRKRYTSTKEVLDATLIHQSITGLYETRIDLSQLGGD [symbol] | |
| | [symbol] [symbol] [symbol] [symbol] [symbol] | |
| | [symbol] [symbol] [symbol] [symbol] [symbol] | |
| | [symbol] [symbol] [symbol] [symbol] [symbol] | |
| | [symbol] KRTADGSEFEPKKKRKV | |
| EA-BE4 | MKRTADGSEFESPKKKRKVSSETGPVAVDPTLRRRIEPHEFEVFFDPRELRKETCLLYE | 3201 |
| Cas9 = SpCas9 | INWGGREAIWRHTSQNTNKHVEVNFIEKFTTERYFCPNTRCSITWFLSWSPCGECSRAI | |
| | TEFLSRYPHVTLFIYIARLYHHADPRNRQGLRDLISSGVTIQIMTEQESGYCWRNFVNY | |
| | SPSNEAHWPRYPHLWVRLYVLELYCIILGLPPCLNILRRKQPQLTFFTIALQSCHYQRL | |
| | PPHILWATGLKSGGSSGGSSGSETPGTSESATPESSGGSSGGDKKYSIGLAIGTNSVGW | |
| | AVITDEYKVPSKKFKVLGNTDRHSIKKNLIGALLFDSGETAEATRLKRTARRRYTRRKN | |
| | RICYLQEIFSNEMAKVDDSFFHRLEESFLVEEDKKHERHPIFGNIVDEVAYHEKYPTIY | |
| | HLRKKLVDSTDKADLRLIYLALAHMIKFRGHFLIEGDLNPDNSDVDKLFIQLVQTYNQL | |
| | FEENPINASGVDAKAILSARLSKSRRLENLIAQLPGEKKNGLFGNLIALSLGLTPNFKS | |
| | NFDLAEDAKLQLSKDTYDDDLDNLLAQIGDQYADLFLAAKNLSDAILLSDILRVNTEIT | |
| | KAPLSASMIKRYDEHHQDLTLLKALVRQQLPEKYKEIFFDQSKNGYAGYIDGGASQEEF | |
| | YKFIKPILEKMDGTEELLVKLNREDLLRKQRTFDNGSIPHQIHLGELHAILRRQEDFYP | |
| | FLKDNREKIEKILTFRIPYYVGPLARGNSRFAWMTRKSEETITPWNFEEVVDKGASAQS | |
| | FIERMTNFDKNLPNEKVLPKHSLLYEYFTVYNELTKVKYVTEGMRKPAFLSGEQKKAIV | |
| | DLLFKTNRKVTVKQLKEDYFKKIECFDSVEISGVEDRFNASLGTYHDLLKIIKDKDFLD | |
| | NEENEDILEDIVLTLTLFEDREMIEERLKTYAHLFDDKVMKQLKRRRYTGWGRLSRKLI | |
| | NGIRDKQSGKTILDFLKSDGFANRNFMQLIHDDSLTFKEDIQKAQVSGQGDSLHEHIAN | |
| | LAGSPAIKKGILQTVKVVDELVKVMGRHKPENIVIEMARENQTTQKGQKNSRERMKRIE | |
| | EGIKELGSQILKEHPVENTQLQNEKLYLYYLQNGRDMYVDQELDINRLSDYDVDHIVPQ | |
| | SFLKDDSIDNKVLTRSDKNRGKSDNVPSEEVVKKMKNYWRQLLNAKLITQRKFDNLTKA | |
| | ERGGLSELDKAGFIKRQLVETRQITKHVAQILDSRMNTKYDENDKLIREVKVITLKSKL | |
| | VSDFRKDFQFYKVREINNYHHAHDAYLNAVVGTALIKKYPKLESEFVYGDYKVYDVRKM | |
| | IAKSEQEIGKATAKYFFYSNIMNFFKTEITLANGEIRKRPLIETNGETGEIVWDKGRDF | |
| | ATVRKVLSMPQVNIVKKTEVQTGGFSKESILPKRNSDKLIARKKDWDPKKYGGFDSPTV | |
| | AYSVLVVAKVEKGKSKKLKSVKELLGITIMERSSFEKNPIDFLEAKGYKEVKKDLIIKL | |
| | PKYSLFELENGRKRMLASAGELQKGNELALPSKYVNFLYLASHYEKLKGSPEDNEQKQL | |
| | FVEQHKHYLDEIIEQISEFSKRVILADANLDKVLSAYNKHRDKPIREQAENIIHLFTLT | |
| | NLGAPAAFKYFDTTIDRKRYTSTKEVLDATLIHQSITGLYETRIDLSQLGGDS [symbol] | |
| | [symbol] [symbol] [symbol] [symbol] | |
| | [symbol] [symbol] [symbol] [symbol] | |
| | [symbol] [symbol] [symbol] [symbol] | |
| | [symbol] KRTADGSEFEPKKKRKV | |
| AID-BE4 | MKRTADGSEFESPKKKRKVDSLLMNRRKFLYQFKNVRWAKGRRETYLCYVVKRRDSATS | 3202 |
| Cas9 = SpCas9 | FSLDFGYLRNKNGCHVELLFLRYISDWDLDPGRCYRVTWFTSWSPCYDCARHVADFLRG | |
| | NPNLSLRIFTARLYFCEDRKAEPEGLRRLHRAGVQIAIMTFKDYFYCWNTFVENHERTF | |
| | KAWEGLHENSVRLSRQLRRILLPLYEVDDLRDAFRTLGLSGGSSGGSSGSETPGTSESA | |
| | TPESSGGSSGGDKKYSIGLAIGTNSVGWAVITDEYKVPSKKFKVLGNTDRHSIKKNLIG | |
| | ALLFDSGETAEATRLKRTARRRYTRRKNRICYLQEIFSNEMAKVDDSFFHRLEESFLVE | |
| | EDKKHERHPIFGNIVDEVAYHEKYPTIYHLRKKLVDSTDKADLRLIYLALAHMIKFRGH | |
| | FLIEGDLNPDNSDVDKLFIQLVQTYNQLFEENPINASGVDAKAILSARLSKSRRLENLI | |
| | AQLPGEKKNGLFGNLIALSLGLTPNFKSNFDLAEDAKLQLSKDTYDDDLDNLLAQIGDQ | |
| | YADLFLAAKNLSDAILLSDILRVNTEITKAPLSASMIKRYDEHHQDLTLLKALVRQQLP | |
| | EKYKEIFFDQSKNGYAGYIDGGASQEEFYKFIKPILEKMDGTEELLVKLNREDLLRKQR | |
| | TFDNGSIPHQIHLGELHAILRRQEDFYPFLKDNREKIEKILTFRIPYYVGPLARGNSRF | |
| | AWMTRKSEETITPWNFEEVVDKGASAQSFIERMTNFDKNLPNEKVLPKHSLLYEYFTVY | |
| | NELTKVKYVTEGMRKPAFLSGEQKKAIVDLLFKTNRKVTVKQLKEDYFKKIECFDSVEI | |
| | SGVEDRFNASLGTYHDLLKIIKDKDFLDNEENEDILEDIVLTLTLFEDREMIEERLKTY | |
| | AHLFDDKVMKQLKRRRYTGWGRLSRKLINGIRDKQSGKTILDFLKSDGFANRNFMQLIH | |
| | DDSLTFKEDIQKAQVSGQGDSLHEHIANLAGSPAIKKGILQTVKVVDELVKVMGRHKPE | |
| | NIVIEMARENQTTQKGQKNSRERMKRIEEGIKELGSQILKEHPVENTQLQNEKLYLYYL | |
| | QNGRDMYVDQELDINRLSDYDVDHIVPQSFLKDDSIDNKVLTRSDKNRGKSDNVPSEEV | |
| | VKKMKNYWRQLLNAKLITQRKFDNLTKAERGGLSELDKAGFIKRQLVETRQITKHVAQI | |
| | LDSRMNTKYDENDKLIREVKVITLKSKLVSDFRKDFQFYKVREINNYHHAHDAYLNAVV | |
| | GTALIKKYPKLESEFVYGDYKVYDVRKMIAKSEQEIGKATAKYFFYSNIMNFFKTEITL | |
| | ANGEIRKRPLIETNGETGEIVWDKGRDFATVRKVLSMPQVNIVKKTEVQTGGFSKESIL | |
| | PKRNSDKLIARKKDWDPKKYGGFDSPTVAYSVLVVAKVEKGKSKKLKSVKELLGITIME | |
| | RSSFEKNPIDFLEAKGYKEVKKDLIIKLPKYSLFELENGRKRMLASAGELQKGNELALP | |
| | SKYVNFLYLASHYEKLKGSPEDNEQKQLFVEQHKHYLDEIIEQISEFSKRVILADANLD | |
| | KVLSAYNKHRDKPIREQAENIIHLFTLTNLGAPAAFKYFDTTIDRKRYTSTKEVLDATL | |
| | IHQSITGLYETRIDLSQLGGD [symbol] [symbol] [symbol] | |
| | [symbol] [symbol] [symbol] [symbol] [symbol] | |
| | [symbol] [symbol] [symbol] [symbol] [symbol] | |
| | [symbol] [symbol] [symbol] KRTADGSEFEPKKKRKV | |
| CDA-BE4 (or CDA1- | MKRTADGSEFESPKKKRKVTDAEYVRIHEKLDIYTFKKQFFNNKKSVSHRCYVLFELKR | 3203 |
| BE4max) | RGERRACFWGYAVNKPQSGTERGIHAEIFSIRKVEEYLRDNPGQFTINWYSSWSPCADC | |
| Cas9 = SpCas9 | AEKILEWYNQELRGNGHTLKIWACKLYYEKNARNQIGLWNLRDNGVGLNVMVSEHYQCC | |
| | RKIFIQSSHNQLNENRWLEKTLKRAEKRRSELSIMIQVKILHTTKSPAVSGGSSGGSSG | |
| | SETPGTSESATPESSGGSSGGDKKYSIGLAIGTNSVGWAVITDEYKVPSKKFKVLGNTD | |
| | RHSIKKNLIGALLFDSGETAEATRLKRTARRRYTRRKNRICYLQEIFSNEMAKVDDSFF | |
| | HRLEESFLVEEDKKHERHPIFGNIVDEVAYHEKYPTIYHLRKKLVDSTDKADLRLIYLA | |
| | LAHMIKFRGHFLIEGDLNPDNSDVDKLFIQLVQTYNQLFEENPINASGVDAKAILSARL | |
| | SKSRRLENLIAQLPGEKKNGLFGNLIALSLGLTPNFKSNFDLAEDAKLQLSKDTYDDDL | |
| | DNLLAQIGDQYADLFLAAKNLSDAILLSDILRVNTEITKAPLSASMIKRYDEHHQDLTL | |
| | LKALVRQQLPEKYKEIFFDQSKNGYAGYIDGGASQEEFYKFIKPILEKMDGTEELLVKL | |
| | NREDLLRKQRTFDNGSIPHQIHLGELHAILRRQEDFYPFLKDNREKIEKILTFRIPYYV | |
| | GPLARGNSRFAWMTRKSEETITPWNFEEVVDKGASAQSFIERMTNFDKNLPNEKVLPKH | |
| | SLLYEYFTVYNELTKVKYVTEGMRKPAFLSGEQKKAIVDLLFKTNRKVTVKQLKEDYFK | |
| | KIECFDSVEISGVEDRFNASLGTYHDLLKIIKDKDFLDNEENEDILEDIVLTLTLFEDR | |
| | EMIEERLKTYAHLFDDKVMKQLKRRRYTGWGRLSRKLINGIRDKQSGKTILDFLKSDGF | |
| | ANRNFMQLIHDDSLTFKEDIQKAQVSGQGDSLHEHIANLAGSPAIKKGILQTVKVVDEL | |
| | VKVMGRHKPENIVIEMARENQTTQKGQKNSRERMKRIEEGIKELGSQILKEHPVENTQL | |
| | QNEKLYLYYLQNGRDMYVDQELDINRLSDYDVDHIVPQSFLKDDSIDNKVLTRSDKNRG | |
| | KSDNVPSEEVVKKMKNYWRQLLNAKLITQRKFDNLTKAERGGLSELDKAGFIKRQLVET | |
| | RQITKHVAQILDSRMNTKYDENDKLIREVKVITLKSKLVSDFRKDFQFYKVREINNYHH | |
| | AHDAYLNAVVGTALIKKYPKLESEFVYGDYKVYDVRKMIAKSEQEIGKATAKYFFYSNI | |
| | MNFFKTEITLANGEIRKRPLIETNGETGEIVWDKGRDFATVRKVLSMPQVNIVKKTEVQ | |
| | TGGFSKESILPKRNSDKLIARKKDWDPKKYGGFDSPTVAYSVLVVAKVEKGKSKKLKSV | |
| | KELLGITIMERSSFEKNPIDFLEAKGYKEVKKDLIIKLPKYSLFELENGRKRMLASAGE | |
| | LQKGNELALPSKYVNFLYLASHYEKLKGSPEDNEQKQLFVEQHKHYLDEIIEQISEFSK | |
| | RVILADANLDKVLSAYNKHRDKPIREQAENIIHLFTLTNLGAPAAFKYFDTTIDRKRYT | |
| | STKEVLDATLIHQSITGLYETRIDLSQLGGDS [symbol] [symbol] | |
| | [symbol] [symbol] [symbol] [symbol] | |
| | [symbol] [symbol] [symbol] [symbol] [symbol] | |
| | [symbol] [symbol] [symbol] [symbol] | |
| | [symbol] KRTADGSEFEPKKKRKV | |
| evoA-BE4 (or | MKRTADGSEFESPKKKRKVSKTGPVAVDPTLRRRIEPHEFEVFFDPRELRKETCLLYEI | 3204 |
| evoAPOBEC1-BE4max) | NWGGRHSIWRHTSQNTNKHVEVNFIEKFTTERYFCPNTRCSITWFLSWSPCGECSRAIT | |
| Cas9 = SpCas9 | EFLSRYPNVTLFIYIARLYHLANPRNRQGLRDLISSGVTIQIMTEQESGYCWHNFVNYS | |
| | PSNESHWPRYPHLWVRLYVLELYCIILGLPPCLNILRRKQSQLTSFTIALQSCHYQRLP | |
| | PHILWATGLKSGGSSGGSSGSETPGTSESATPESSGGSSGGDKKYSIGLAIGTNSVGWA | |
| | VITDEYKVPSKKFKVLGNTDRHSIKKNLIGALLFDSGETAEATRLKRTARRRYTRRKNR | |
| | ICYLQEIFSNEMAKVDDSFFHRLEESFLVEEDKKHERHPIFGNIVDEVAYHEKYPTIYH | |
| | LRKKLVDSTDKADLRLIYLALAHMIKFRGHFLIEGDLNPDNSDVDKLFIQLVQTYNQLF | |
| | EENPINASGVDAKAILSARLSKSRRLENLIAQLPGEKKNGLFGNLIALSLGLTPNFKSN | |
| | FDLAEDAKLQLSKDTYDDDLDNLLAQIGDQYADLFLAAKNLSDAILLSDILRVNTEITK | |
| | APLSASMIKRYDEHHQDLTLLKALVRQQLPEKYKEIFFDQSKNGYAGYIDGGASQEEFY | |
| | KFIKPILEKMDGTEELLVKLNREDLLRKQRTFDNGSIPHQIHLGELHAILRRQEDFYPF | |
| | LKDNREKIEKILTFRIPYYVGPLARGNSRFAWMTRKSEETITPWNFEEVVDKGASAQSF | |
| | IERMTNFDKNLPNEKVLPKHSLLYEYFTVYNELTKVKYVTEGMRKPAFLSGEQKKAIVD | |
| | LLFKTNRKVTVKQLKEDYFKKIECFDSVEISGVEDRFNASLGTYHDLLKIIKDKDFLDN | |
| | EENEDILEDIVLTLTLFEDREMIEERLKTYAHLFDDKVMKQLKRRRYTGWGRLSRKLIN | |
| | GIRDKQSGKTILDFLKSDGFANRNFMQLIHDDSLTFKEDIQKAQVSGQGDSLHEHIANL | |
| | AGSPAIKKGILQTVKVVDELVKVMGRHKPENIVIEMARENQTTQKGQKNSRERMKRIEE | |
| | GIKELGSQILKEHPVENTQLQNEKLYLYYLQNGRDMYVDQELDINRLSDYDVDHIVPQS | |
| | FLKDDSIDNKVLTRSDKNRGKSDNVPSEEVVKKMKNYWRQLLNAKLITQRKFDNLTKAE | |
| | RGGLSELDKAGFIKRQLVETRQITKHVAQILDSRMNTKYDENDKLIREVKVITLKSKLV | |
| | SDFRKDFQFYKVREINNYHHAHDAYLNAVVGTALIKKYPKLESEFVYGDYKVYDVRKMI | |
| | AKSEQEIGKATAKYFFYSNIMNFFKTEITLANGEIRKRPLIETNGETGEIVWDKGRDFA | |
| | TVRKVLSMPQVNIVKKTEVQTGGFSKESILPKRNSDKLIARKKDWDPKKYGGFDSPTVA | |
| | YSVLVVAKVEKGKSKKLKSVKELLGITIMERSSFEKNPIDFLEAKGYKEVKKDLIIKLP | |
| | KYSLFELENGRKRMLASAGELQKGNELALPSKYVNFLYLASHYEKLKGSPEDNEQKQLF | |
| | VEQHKHYLDEIIEQISEFSKRVILADANLDKVLSAYNKHRDKPIREQAENIIHLFTLTN | |
| | LGAPAAFKYFDTTIDRKRYTSTKEVLDATLIHQSITGLYETRIDLSQLGGD [symbol] | |
| | [symbol] [symbol] [symbol] [symbol] | |
| | [symbol] [symbol] [symbol] [symbol] | |
| | [symbol] [symbol] [symbol] [symbol] | |
| | [symbol] KRTADGSEFEPKKKRKV | |
| eA3A-BE4 (or APOBEC3A) | MKRTADGSEFESPKKKRKVEASPASGPRHLMDPHIFTSNFNNGIGRHKTYLCYEVERLD | 3205 |
| Cas9 = SpCas9 | NGTSVKMDQHRGFLHGQAKNLLCGFYGRHAELRFLDLVPSLQLDPAQIYRVTWFISWSP | |
| | CFSWGCAGEVRAFLQENTHVRLRIFAARIYDYDPLYKEALQMLRDAGAQVSIMTYDEFK | |
| | HCWDTFVDHQGCPFQPWDGLDEHSQALSGRLRAILQNQGNSGGSSGGSSGSETPGTSES | |
| | ATPESSGGSSGGDKKYSIGLAIGTNSVGWAVITDEYKVPSKKFKVLGNTDRHSIKKNLI | |
| | GALLFDSGETAEATRLKRTARRRYTRRKNRICYLQEIFSNEMAKVDDSFFHRLEESFLV | |
| | EEDKKHERHPIFGNIVDEVAYHEKYPTIYHLRKKLVDSTDKADLRLIYLALAHMIKFRG | |
| | HFLIEGDLNPDNSDVDKLFIQLVQTYNQLFEENPINASGVDAKAILSARLSKSRRLENL | |
| | IAQLPGEKKNGLFGNLIALSLGLTPNFKSNFDLAEDAKLQLSKDTYDDDLDNLLAQIGD | |
| | QYADLFLAAKNLSDAILLSDILRVNTEITKAPLSASMIKRYDEHHQDLTLLKALVRQQL | |
| | PEKYKEIFFDQSKNGYAGYIDGGASQEEFYKFIKPILEKMDGTEELLVKLNREDLLRKQ | |
| | RTFDNGSIPHQIHLGELHAILRRQEDFYPFLKDNREKIEKILTFRIPYYVGPLARGNSR | |
| | FAWMTRKSEETITPWNFEEVVDKGASAQSFIERMTNFDKNLPNEKVLPKHSLLYEYFTV | |
| | YNELTKVKYVTEGMRKPAFLSGEQKKAIVDLLFKTNRKVTVKQLKEDYFKKIECFDSVE | |
| | ISGVEDRFNASLGTYHDLLKIIKDKDFLDNEENEDILEDIVLTLTLFEDREMIEERLKT | |
| | YAHLFDDKVMKQLKRRRYTGWGRLSRKLINGIRDKQSGKTILDFLKSDGFANRNFMQLI | |
| | HDDSLTFKEDIQKAQVSGQGDSLHEHIANLAGSPAIKKGILQTVKVVDELVKVMGRHKP | |
| | ENIVIEMARENQTTQKGQKNSRERMKRIEEGIKELGSQILKEHPVENTQLQNEKLYLYY | |
| | LQNGRDMYVDQELDINRLSDYDVDHIVPQSFLKDDSIDNKVLTRSDKNRGKSDNVPSEE | |
| | VVKKMKNYWRQLLNAKLITQRKFDNLTKAERGGLSELDKAGFIKRQLVETRQITKHVAQ | |
| | ILDSRMNTKYDENDKLIREVKVITLKSKLVSDFRKDFQFYKVREINNYHHAHDAYLNAV | |
| | VGTALIKKYPKLESEFVYGDYKVYDVRKMIAKSEQEIGKATAKYFFYSNIMNFFKTEIT | |
| | LANGEIRKRPLIETNGETGEIVWDKGRDFATVRKVLSMPQVNIVKKTEVQTGGFSKESI | |
| | LPKRNSDKLIARKKDWDPKKYGGFDSPTVAYSVLVVAKVEKGKSKKLKSVKELLGITIM | |
| | ERSSFEKNPIDFLEAKGYKEVKKDLIIKLPKYSLFELENGRKRMLASAGELQKGNELAL | |
| | PSKYVNFLYLASHYEKLKGSPEDNEQKQLFVEQHKHYLDEIIEQISEFSKRVILADANL | |
| | DKVLSAYNKHRDKPIREQAENIIHLFTLTNLGAPAAFKYFDTTIDRKRYTSTKEVLDAT | |
| | LIHQSITGLYETRIDLSQLGGD [symbol] [symbol] | |
| | [symbol] [symbol] [symbol] [symbol] | |
| | [symbol] [symbol] [symbol] | |
| | [symbol] [symbol] [symbol] KRTADGSEFEPKKKRKV | |
| eA3A-T31A | MKRTADGSEFESPKKKRKVEASPASGPRHLMDPHIFTSNFNNGIGRHKAYLCYEVERLD | 3206 |
| Cas9 = SpCas9 | NGTSVKMDQHRGFLHGQAKNLLCGFYGRHAELRFLDLVPSLQLDPAQIYRVTWFISWSP | |
| | CFSWGCAGEVRAFLQENTHVRLRIFAARIYDYDPLYKEALQMLRDAGAQVSIMTYDEFK | |
| | HCWDTFVDHQGCPFQPWDGLDEHSQALSGRLRAILQNQGNSGGSSGGSSGSETPGTSES | |
| | ATPESSGGSSGGDKKYSIGLAIGTNSVGWAVITDEYKVPSKKFKVLGNTDRHSIKKNLI | |
| | GALLFDSGETAEATRLKRTARRRYTRRKNRICYLQEIFSNEMAKVDDSFFHRLEESFLV | |
| | EEDKKHERHPIFGNIVDEVAYHEKYPTIYHLRKKLVDSTDKADLRLIYLALAHMIKFRG | |
| | HFLIEGDLNPDNSDVDKLFIQLVQTYNQLFEENPINASGVDAKAILSARLSKSRRLENL | |
| | IAQLPGEKKNGLFGNLIALSLGLTPNFKSNFDLAEDAKLQLSKDTYDDDLDNLLAQIGD | |
| | QYADLFLAAKNLSDAILLSDILRVNTEITKAPLSASMIKRYDEHHQDLTLLKALVRQQL | |
| | PEKYKEIFFDQSKNGYAGYIDGGASQEEFYKFIKPILEKMDGTEELLVKLNREDLLRKQ | |
| | RTFDNGSIPHQIHLGELHAILRRQEDFYPFLKDNREKIEKILTFRIPYYVGPLARGNSR | |
| | FAWMTRKSEETITPWNFEEVVDKGASAQSFIERMTNFDKNLPNEKVLPKHSLLYEYFTV | |
| | YNELTKVKYVTEGMRKPAFLSGEQKKAIVDLLFKTNRKVTVKQLKEDYFKKIECFDSVE | |
| | ISGVEDRFNASLGTYHDLLKIIKDKDFLDNEENEDILEDIVLTLTLFEDREMIEERLKT | |
| | YAHLFDDKVMKQLKRRRYTGWGRLSRKLINGIRDKQSGKTILDFLKSDGFANRNFMQLI | |
| | HDDSLTFKEDIQKAQVSGQGDSLHEHIANLAGSPAIKKGILQTVKVVDELVKVMGRHKP | |
| | ENIVIEMARENQTTQKGQKNSRERMKRIEEGIKELGSQILKEHPVENTQLQNEKLYLYY | |
| | LQNGRDMYVDQELDINRLSDYDVDHIVPQSFLKDDSIDNKVLTRSDKNRGKSDNVPSEE | |
| | VVKKMKNYWRQLLNAKLITQRKFDNLTKAERGGLSELDKAGFIKRQLVETRQITKHVAQ | |
| | ILDSRMNTKYDENDKLIREVKVITLKSKLVSDFRKDFQFYKVREINNYHHAHDAYLNAV | |
| | VGTALIKKYPKLESEFVYGDYKVYDVRKMIAKSEQEIGKATAKYFFYSNIMNFFKTEIT | |
| | LANGEIRKRPLIETNGETGEIVWDKGRDFATVRKVLSMPQVNIVKKTEVQTGGFSKESI | |
| | LPKRNSDKLIARKKDWDPKKYGGFDSPTVAYSVLVVAKVEKGKSKKLKSVKELLGITIM | |
| | ERSSFEKNPIDFLEAKGYKEVKKDLIIKLPKYSLFELENGRKRMLASAGELQKGNELAL | |
| | PSKYVNFLYLASHYEKLKGSPEDNEQKQLFVEQHKHYLDEIIEQISEFSKRVILADANL | |
| | DKVLSAYNKHRDKPIREQAENIIHLFTLTNLGAPAAFKYFDTTIDRKRYTSTKEVLDAT | |
| | LIHQSITGLYETRIDLSQLGGD [symbol] [symbol] | |
| | [symbol] [symbol] [symbol] [symbol] | |
| | [symbol] [symbol] [symbol] [symbol] | |
| | [symbol] [symbol] KRTADGSEFEPKKKRKV | |
| eA3A-BE5 | MKRTADGSEFESPKKKRKVEASPASGPRHLMDPHIFTSNFNNGIGRHKTYLCYEVERLD | 3207 |
| Cas9 = SpCas9 | NGDAVKMDQHRGFLHGQAKNLLCGFYGRHAELRFLDLVPSLQLDPAQIYRVTWFISWSP | |
| | CFSWGCAGEVRAFLQENTHVRLRIFAARIYDYDPLYKEALQMLRDAGAQVSIMTYDEFK | |
| | HCWDTFVDHQGCPFQPWDGLDEHSQALSGRLRAILQNQGNSGGSSGGSSGSETPGTSES | |
| | ATPESSGGSSGGDKKYSIGLAIGTNSVGWAVITDEYKVPSKKFKVLGNTDRHSIKKNLI | |
| | GALLFDSGETAEATRLKRTARRRYTRRKNRICYLQEIFSNEMAKVDDSFFHRLEESFLV | |
| | EEDKKHERHPIFGNIVDEVAYHEKYPTIYHLRKKLVDSTDKADLRLIYLALAHMIKFRG | |
| | HFLIEGDLNPDNSDVDKLFIQLVQTYNQLFEENPINASGVDAKAILSARLSKSRRLENL | |
| | IAQLPGEKKNGLFGNLIALSLGLTPNFKSNFDLAEDAKLQLSKDTYDDDLDNLLAQIGD | |
| | QYADLFLAAKNLSDAILLSDILRVNTEITKAPLSASMIKRYDEHHQDLTLLKALVRQQL | |
| | PEKYKEIFFDQSKNGYAGYIDGGASQEEFYKFIKPILEKMDGTEELLVKLNREDLLRKQ | |
| | RTFDNGSIPHQIHLGELHAILRRQEDFYPFLKDNREKIEKILTFRIPYYVGPLARGNSR | |
| | FAWMTRKSEETITPWNFEEVVDKGASAQSFIERMTNFDKNLPNEKVLPKHSLLYEYFTV | |
| | YNELTKVKYVTEGMRKPAFLSGEQKKAIVDLLFKTNRKVTVKQLKEDYFKKIECFDSVE | |
| | ISGVEDRFNASLGTYHDLLKIIKDKDFLDNEENEDILEDIVLTLTLFEDREMIEERLKT | |
| | YAHLFDDKVMKQLKRRRYTGWGRLSRKLINGIRDKQSGKTILDFLKSDGFANRNFMQLI | |
| | HDDSLTFKEDIQKAQVSGQGDSLHEHIANLAGSPAIKKGILQTVKVVDELVKVMGRHKP | |
| | ENIVIEMARENQTTQKGQKNSRERMKRIEEGIKELGSQILKEHPVENTQLQNEKLYLYY | |
| | LQNGRDMYVDQELDINRLSDYDVDHIVPQSFLKDDSIDNKVLTRSDKNRGKSDNVPSEE | |
| | VVKKMKNYWRQLLNAKLITQRKFDNLTKAERGGLSELDKAGFIKRQLVETRQITKHVAQ | |
| | ILDSRMNTKYDENDKLIREVKVITLKSKLVSDFRKDFQFYKVREINNYHHAHDAYLNAV | |
| | VGTALIKKYPKLESEFVYGDYKVYDVRKMIAKSEQEIGKATAKYFFYSNIMNFFKTEIT | |
| | LANGEIRKRPLIETNGETGEIVWDKGRDFATVRKVLSMPQVNIVKKTEVQTGGFSKESI | |
| | LPKRNSDKLIARKKDWDPKKYGGFDSPTVAYSVLVVAKVEKGKSKKLKSVKELLGITIM | |
| | ERSSFEKNPIDFLEAKGYKEVKKDLIIKLPKYSLFELENGRKRMLASAGELQKGNELAL | |
| | PSKYVNFLYLASHYEKLKGSPEDNEQKQLFVEQHKHYLDEIIEQISEFSKRVILADANL | |
| | DKVLSAYNKHRDKPIREQAENIIHLFTLTNLGAPAAFKYFDTTIDRKRYTSTKEVLDAT | |
| | LIHQSITGLYETRIDLSQLGGD [symbol] [symbol] | |
| | [symbol] [symbol] [symbol] [symbol] | |
| | [symbol] [symbol] [symbol] [symbol] | |
| | [symbol] [symbol] KRTADGSEFEPKKKRKV | |
| BE4-CP1028 | MKRTADGSEFESPKKKRKVSSETGPVAVDPTLRRRIEPHEFEVFFDPRELRKETCLLYE | 3208 |
| Cas9 = Cas9 CP1028 | INWGGRHSIWRHTSQNTNKHVEVNFIEKFTTERYFCPNTRCSITWFLSWSPCGECSRAI | |
| | TEFLSRYPHVTLFIYIARLYHHADPRNRQGLRDLISSGVTIQIMTEQESGYCWRNFVNY | |
| | SPSNEAHWPRYPHLWVRLYVLELYCIILGLPPCLNILRRKQPQLTFFTIALQSCHYQRL | |
| | PPHILWATGLKSGGSSGGSSGSETPGTSESATPESSGGSSGGEIGKATAKYFFYSNIMN | |
| | FFKTEITLANGEIRKRPLIETNGETGEIVWDKGRDFATVRKVLSMPQVNIVKKTEVQTG | |
| | GFSKESILPKRNSDKLIARKKDWDPKKYGGFDSPTVAYSVLVVAKVEKGKSKKLKSVKE | |
| | LLGITIMERSSFEKNPIDFLEAKGYKEVKKDLIIKLPKYSLFELENGRKRMLASAGELQ | |
| | KGNELALPSKYVNFLYLASHYEKLKGSPEDNEQKQLFVEQHKHYLDEIIEQISEFSKRV | |
| | ILADANLDKVLSAYNKHRDKPIREQAENIIHLFTLTNLGAPAAFKYFDTTIDRKRYTST | |
| | KEVLDATLIHQSITGLYETRIDLSQLGGDGGSGGSGGSGGSGGSGGSGGMDKKYSIGLA | |
| | IGTNSVGWAVITDEYKVPSKKFKVLGNTDRHSIKKNLIGALLFDSGETAEATRLKRTAR | |
| | RRYTRRKNRICYLQEIFSNEMAKVDDSFFHRLEESFLVEEDKKHERHPIFGNIVDEVAY | |
| | HEKYPTIYHLRKKLVDSTDKADLRLIYLALAHMIKFRGHFLIEGDLNPDNSDVDKLFIQ | |
| | LVQTYNQLFEENPINASGVDAKAILSARLSKSRRLENLIAQLPGEKKNGLFGNLIALSL | |
| | GLTPNFKSNFDLAEDAKLQLSKDTYDDDLDNLLAQIGDQYADLFLAAKNLSDAILLSDI | |
| | LRVNTEITKAPLSASMIKRYDEHHQDLTLLKALVRQQLPEKYKEIFFDQSKNGYAGYID | |
| | GGASQEEFYKFIKPILEKMDGTEELLVKLNREDLLRKQRTFDNGSIPHQIHLGELHAIL | |
| | RRQEDFYPFLKDNREKIEKILTFRIPYYVGPLARGNSRFAWMTRKSEETITPWNFEEVV | |
| | DKGASAQSFIERMTNFDKNLPNEKVLPKHSLLYEYFTVYNELTKVKYVTEGMRKPAFLS | |
| | GEQKKAIVDLLFKTNRKVTVKQLKEDYFKKIECFDSVEISGVEDRFNASLGTYHDLLKI | |
| | IKDKDFLDNEENEDILEDIVLTLTLFEDREMIEERLKTYAHLFDDKVMKQLKRRRYTGW | |
| | GRLSRKLINGIRDKQSGKTILDFLKSDGFANRNFMQLIHDDSLTFKEDIQKAQVSGQGD | |
| | SLHEHIANLAGSPAIKKGILQTVKVVDELVKVMGRHKPENIVIEMARENQTTQKGQKNS | |
| | RERMKRIEEGIKELGSQILKEHPVENTQLQNEKLYLYYLQNGRDMYVDQELDINRLSDY | |
| | DVDHIVPQSFLKDDSIDNKVLTRSDKNRGKSDNVPSEEVVKKMKNYWRQLLNAKLITQR | |
| | KFDNLTKAERGGLSELDKAGFIKRQLVETRQITKHVAQILDSRMNTKYDENDKLIREVK | |
| | VITLKSKLVSDFRKDFQFYKVREINNYHHAHDAYLNAVVGTALIKKYPKLESEFVYGDY | |
| | KVYDVRKMIAK [symbol] [symbol] | |
| | [symbol] [symbol] [symbol] [symbol] | |
| | [symbol] [symbol] [symbol] [symbol] | |
| | [symbol] [symbol] KRTADGSEFEPKKKRKV | |
| BE4-Cas9-NG | MKRTADGSEFESPKKKRKVSSETGPVAVDPTLRRRIEPHEFEVFFDPRELRKETCLLYE | 3209 |
| Cas9 = Cas9 NG | INWGGRHSIWRHTSQNTNKHVEVNFIEKFTTERYFCPNTRCSITWFLSWSPCGECSRAI | |
| | TEFLSRYPHVTLFIYIARLYHHADPRNRQGLRDLISSGVTIQIMTEQESGYCWRNFVNY | |
| | SPSNEAHWPRYPHLWVRLYVLELYCIILGLPPCLNILRRKQPQLTFFTIALQSCHYQRL | |
| | PPHILWATGLKSGGSSGGSSGSETPGTSESATPESSGGSSGGDKKYSIGLAIGTNSVGW | |
| | AVITDEYKVPSKKFKVLGNTDRHSIKKNLIGALLFDSGETAEATRLKRTARRRYTRRKN | |
| | RICYLQEIFSNEMAKVDDSFFHRLEESFLVEEDKKHERHPIFGNIVDEVAYHEKYPTIY | |
| | HLRKKLVDSTDKADLRLIYLALAHMIKFRGHFLIEGDLNPDNSDVDKLFIQLVQTYNQL | |
| | FEENPINASGVDAKAILSARLSKSRRLENLIAQLPGEKKNGLFGNLIALSLGLTPNFKS | |
| | NFDLAEDAKLQLSKDTYDDDLDNLLAQIGDQYADLFLAAKNLSDAILLSDILRVNTEIT | |
| | KAPLSASMIKRYDEHHQDLTLLKALVRQQLPEKYKEIFFDQSKNGYAGYIDGGASQEEF | |
| | YKFIKPILEKMDGTEELLVKLNREDLLRKQRTFDNGSIPHQIHLGELHAILRRQEDFYP | |
| | FLKDNREKIEKILTFRIPYYVGPLARGNSRFAWMTRKSEETITPWNFEEVVDKGASAQS | |
| | FIERMTNFDKNLPNEKVLPKHSLLYEYFTVYNELTKVKYVTEGMRKPAFLSGEQKKAIV | |
| | DLLFKTNRKVTVKQLKEDYFKKIECFDSVEISGVEDRFNASLGTYHDLLKIIKDKDFLD | |
| | NEENEDILEDIVLTLTLFEDREMIEERLKTYAHLFDDKVMKQLKRRRYTGWGRLSRKLI | |
| | NGIRDKQSGKTILDFLKSDGFANRNFMQLIHDDSLTFKEDIQKAQVSGQGDSLHEHIAN | |
| | LAGSPAIKKGILQTVKVVDELVKVMGRHKPENIVIEMARENQTTQKGQKNSRERMKRIE | |
| | EGIKELGSQILKEHPVENTQLQNEKLYLYYLQNGRDMYVDQELDINRLSDYDVDHIVPQ | |
| | SFLKDDSIDNKVLTRSDKNRGKSDNVPSEEVVKKMKNYWRQLLNAKLITQRKFDNLTKA | |
| | ERGGLSELDKAGFIKRQLVETRQITKHVAQILDSRMNTKYDENDKLIREVKVITLKSKL | |
| | VSDFRKDFQFYKVREINNYHHAHDAYLNAVVGTALIKKYPKLESEFVYGDYKVYDVRKM | |
| | IAKSEQEIGKATAKYFFYSNIMNFFKTEITLANGEIRKRPLIETNGETGEIVWDKGRDF | |
| | ATVRKVLSMPQVNIVKKTEVQTGGFSKESIRPKRNSDKLIARKKDWDPKKYGGFVSPTV | |
| | AYSVLVVAKVEKGKSKKLKSVKELLGITIMERSSFEKNPIDFLEAKGYKEVKKDLIIKL | |
| | PKYSLFELENGRKRMLASARFLQKGNELALPSKYVNFLYLASHYEKLKGSPEDNEQKQL | |
| | FVEQHKHYLDEIIEQISEFSKRVILADANLDKVLSAYNKHRDKPIREQAENIIHLFTLT | |
| | NLGAPRAFKYFDTTIDRKVYRSTKEVLDATLIHQSITGLYETRIDLSQLGGD [symbol] | |
| | [symbol] [symbol] [symbol] [symbol] [symbol] | |
| | [symbol] [symbol] [symbol] [symbol] [symbol] | |
| | [symbol] [symbol] [symbol] [symbol] | |
| | [symbol] KRTADGSEFEPKKKRKV | |

Key:
NLS (N-terminal) Single underline
APOBEC 1 (BE4) Double underline
Linker Italic
SpCas9 Plain
Linker + 2xUGI Bold underline
NLS (C-terminal) Single underline + italic

[0612] The following ABEs were used to generate training data or the BE-Hive algorithm of Example 1. Each of the ABEs have the same architecture of [NLS]-[deaminase]-[Cas9]-[NLS] (which is the ABEmax architecture) and use the same adenine deaminase, ABE7.10, with either the SpCas9 or CP1041 circular permutant variant as the Cas9 component.

| | | SEQ ID |
|---|---|---|
| DESCRIPTION | SEQUENCE | NO: |
| ABEmax (or ABE) | MKRTADGSEFESPKKKRKVSEVEFSHEYWMRHALTLAKRAWDEREVPVGAVLVHNNRVI | 3210 |
| | GEGWNRPIGRHDPTAHAEIMALRQGGLVMQNYRLIDATLYVTLEPCVMCAGAMIHSRIG | |
| | RVVFGARDAKTGAAGSLMDVLHHPGMNHRVEITEGILADECAALLSDFFRMRRQEIKAQ | |
| | KKAQSSTDSGGSSGGSSGSETPGTSESATPESSGGSSGGSSEVEFSHEYWMRHALTLAK | |
| | RARDEREVPVGAVLVLNNRVIGEGWNRAIGLHDPTAHAEIMALRQGGLVMQNYRLIDAT | |
| | LYVTFEPCVMCAGAMIHSRIGRVVFGVRNAKTGAAGSLMDVLHYPGMNHRVEITEGILA | |
| | DECAALLCYFFRMPRQVFNAQKKAQSSTDSGGSSGGSSGSETPGTSESATPESSGGSSG | |
| | GSDKKYSIGLAIGTNSVGWAVITDEYKVPSKKFKVLGNTDRHSIKKNLIGALLFDSGET | |
| | AEATRLKRTARRRYTRRKNRICYLQEIFSNEMAKVDDSFFHRLEESFLVEEDKKHERHP | |
| | IFGNIVDEVAYHEKYPTIYHLRKKLVDSTDKADLRLIYLALAHMIKFRGHFLIEGDLNP | |
| | DNSDVDKLFIQLVQTYNQLFEENPINASGVDAKAILSARLSKSRRLENLIAQLPGEKKN | |
| | GLFGNLIALSLGLTPNFKSNFDLAEDAKLQLSKDTYDDDLDNLLAQIGDQYADLFLAAK | |
| | NLSDAILLSDILRVNTEITKAPLSASMIKRYDEHHQDLTLLKALVRQQLPEKYKEIFFD | |
| | QSKNGYAGYIDGGASQEEFYKFIKPILEKMDGTEELLVKLNREDLLRKQRTFDNGSIPH | |
| | QIHLGELHAILRRQEDFYPFLKDNREKIEKILTFRIPYYVGPLARGNSRFAWMTRKSEE | |
| | TITPWNFEEVVDKGASAQSFIERMTNFDKNLPNEKVLPKHSLLYEYFTVYNELTKVKYV | |
| | TEGMRKPAFLSGEQKKAIVDLLFKTNRKVTVKQLKEDYFKKIECFDSVEISGVEDRFNA | |
| | SLGTYHDLLKIIKDKDFLDNEENEDILEDIVLTLTLFEDREMIEERLKTYAHLFDDKVM | |
| | KQLKRRRYTGWGRLSRKLINGIRDKQSGKTILDFLKSDGFANRNFMQLIHDDSLTFKED | |
| | IQKAQVSGQGDSLHEHIANLAGSPAIKKGILQTVKVVDELVKVMGRHKPENIVIEMARE | |
| | NQTTQKGQKNSRERMKRIEEGIKELGSQILKEHPVENTQLQNEKLYLYYLQNGRDMYVD | |
| | QELDINRLSDYDVDHIVPQSFLKDDSIDNKVLTRSDKNRGKSDNVPSEEVVKKMKNYWR | |
| | QLLNAKLITQRKFDNLTKAERGGLSELDKAGFIKRQLVETRQITKHVAQILDSRMNTKY | |
| | DENDKLIREVKVITLKSKLVSDFRKDFQFYKVREINNYHHAHDAYLNAVVGTALIKKYP | |
| | KLESEFVYGDYKVYDVRKMIAKSEQEIGKATAKYFFYSNIMNFFKTEITLANGEIRKRP | |
| | LIETNGETGEIVWDKGRDFATVRKVLSMPQVNIVKKTEVQTGGFSKESILPKRNSDKLI | |
| | ARKKDWDPKKYGGFDSPTVAYSVLVVAKVEKGKSKKLKSVKELLGITIMERSSFEKNPI | |
| | DFLEAKGYKEVKKDLIIKLPKYSLFELENGRKRMLASAGELQKGNELALPSKYVNFLYL | |
| | ASHYEKLKGSPEDNEQKQLFVEQHKHYLDEIIEQISEFSKRVILADANLDKVLSAYNKH | |
| | RDKPIREQAENIIHLFTLTNLGAPAAFKYFDTTIDRKRYTSTKEVLDATLIHQSITGLY | |
| | ETRIDLSQLGGD [symbol] [symbol] [symbol] [symbol] | |
| | [symbol] [symbol] [symbol] [symbol] | |
| | [symbol] [symbol] [symbol] [symbol] | |
| | [symbol] [symbol] KRTADGSEFEPKKKRKV | |
| ABE-CP1041 (or ABE-CP) | MKRTADGSEFESPKKKRKVSEVEFSHEYWMRHALTLAKRAWDEREVPVGAVLVHNNRVI | 3211 |
| | GEGWNRPIGRHDPTAHAEIMALRQGGLVMQNYRLIDATLYVTLEPCVMCAGAMIHSRIG | |
| | RWFGARDAKTGAAGSLMDVLHHPGMNHRVEITEGILADECAALLSDFFRMRRQEIKAQ | |
| | KKAQSSTDSGGSSGGSSGSETPGTSESATPESSGGSSGGSSEVEFSHEYWMRHALTLAK | |
| | RARDEREVPVGAVLVLNNRVIGEGWNRAIGLHDPTAHAEIMALRQGGLVMQNYRLIDAT | |
| | LYVTFEPCVMCAGAMIHSRIGRVVFGVRNAKTGAAGSLMDVLHYPGMNHRVEITEGILA | |
| | DECAALLCYFFRMPRQVFNAQKKAQSSTDSGGSSGGSSGSETPGTSESATPESSGGSSG | |
| | GSNIMNFFKTEITLANGEIRKRPLIETNGETGEIVWDKGRDFATVRKVLSMPQVNIVKK | |
| | TEVQTGGFSKESILPKRNSDKLIARKKDWDPKKYGGFDSPTVAYSVLVVAKVEKGKSKK | |
| | LKSVKELLGITIMERSSFEKNPIDFLEAKGYKEVKKDLIIKLPKYSLFELENGRKRMLA | |
| | SAGELQKGNELALPSKYVNFLYLASHYEKLKGSPEDNEQKQLFVEQHKHYLDEIIEQIS | |
| | EFSKRVILADANLDKVLSAYNKHRDKPIREQAENIIHLFTLTNLGAPAAFKYFDTTIDR | |
| | KRYTSTKEVLDATLIHQSITGLYETRIDLSQLGGDGGSGGSGGSGGSGGSGGSGGDKKY | |
| | SIGLAIGTNSVGWAVITDEYKVPSKKFKVLGNTDRHSIKKNLIGALLFDSGETAEATRL | |
| | KRTARRRYTRRKNRICYLQEIFSNEMAKVDDSFFHRLEESFLVEEDKKHERHPIFGNIV | |
| | DEVAYHEKYPTIYHLRKKLVDSTDKADLRLIYLALAHMIKFRGHFLIEGDLNPDNSDVD | |
| | KLFIQLVQTYNQLFEENPINASGVDAKAILSARLSKSRRLENLIAQLPGEKKNGLFGNL | |
| | IALSLGLTPNFKSNFDLAEDAKLQLSKDTYDDDLDNLLAQIGDQYADLFLAAKNLSDAI | |
| | LLSDILRVNTEITKAPLSASMIKRYDEHHQDLTLLKALVRQQLPEKYKEIFFDQSKNGY | |
| | AGYIDGGASQEEFYKFIKPILEKMDGTEELLVKLNREDLLRKQRTFDNGSIPHQIHLGE | |
| | LHAILRRQEDFYPFLKDNREKIEKILTFRIPYYVGPLARGNSRFAWMTRKSEETITPWN | |
| | FEEVVDKGASAQSFIERMTNFDKNLPNEKVLPKHSLLYEYFTVYNELTKVKYVTEGMRK | |
| | PAFLSGEQKKAIVDLLFKTNRKVTVKQLKEDYFKKIECFDSVEISGVEDRFNASLGTYH | |
| | DLLKIIKDKDFLDNEENEDILEDIVLTLTLFEDREMIEERLKTYAHLFDDKVMKQLKRR | |
| | RYTGWGRLSRKLINGIRDKQSGKTILDFLKSDGFANRNFMQLIHDDSLTFKEDIQKAQV | |
| | SGQGDSLHEHIANLAGSPAIKKGILQTVKVVDELVKVMGRHKPENIVIEMARENQTTQK | |
| | GQKNSRERMKRIEEGIKELGSQILKEHPVENTQLQNEKLYLYYLQNGRDMYVDQELDIN | |
| | RLSDYDVDHIVPQSFLKDDSIDNKVLTRSDKNRGKSDNVPSEEVVKKMKNYWRQLLNAK | |
| | LITQRKFDNLTKAERGGLSELDKAGFIKRQLVETRQITKHVAQILDSRMNTKYDENDKL | |
| | IREVKVITLKSKLVSDFRKDFQFYKVREINNYHHAHDAYLNAVVGTALIKKYPKLESEF | |
| | VYGDYKVYDVRKMIAKSEQEIGKATAKYFFYS [symbol] [symbol] | |
| | [symbol] [symbol] [symbol] [symbol] | |
| | [symbol] [symbol] [symbol] [symbol] | |
| | [symbol] [symbol] [symbol] [symbol] | |
| | KRTADGSEFEPKKKRKV | |

Key:
NLS (N-terminal) Single underline
APOBEC 1 (BE4) Double underline
Linker Italic
SpCas9 Plain
inker + 2xUGI Bold underline
NLS (C-terminal) Single underline + italic

### Additional Exemplary ABEs

[0613] Some aspects of the disclosure provide base editors comprising a base editor comprising a napDNAbp domain (e.g., an nCas9 domain) and one or more adenosine deaminase domains (e.g., a heterodimer of adenosine deaminases). Such fusion proteins can be referred to as adenine base editors (ABEs). In some embodiments, the ABEs have reduced off-target effects. In some embodiments, the base editors comprise adenine base editors for multiplexing applications. In still other embodiments, the base editors comprise ancestrally reconstructed adenine base editors.

[0614] The present disclosure provides motifs of newly discovered mutations to TadA 7.10 (SEQ ID NO: 79) (the TadA* used in ABEmax) that yield adenosine deaminase variants and confer broader Cas compatibility to the deaminase. These motifs also confer reduced off-target effects, such as reduced RNA editing activity and off-target DNA editing activity, on the base editor. The base editors of the present disclosure comprise one or more of the disclosed adenosine deaminase variants. In other embodiments, the base editors may comprise one or more adenosine deaminases having two or more such substitutions in combination. In some embodiments, the base editors comprise adenosine deaminases comprising comprises a sequence with at least 80%, 85%, 90%, 95%, 98%, 99%, or 99.5% sequence identity to SEQ ID NO: 91 (TadA-8e).

[0615] Exemplary ABEs include, without limitation, the following fusion proteins (for the purposes of clarity, and wherein shown, the adenosine deaminase domain is shown in bold; mutations of the ecTadA deaminase domain are shown in bold underlining; the XTEN linker is shown in italics; the UGI/AAG/EndoV domains are shown in bold italics; and NLS is shown in underlined italics), and any base editors comprise sequences that are at least 85%, at least 90%, at least 95%, at least 98%, at least 99%, or at least 99.5% identical to any of the following amino acid sequences:

ecTadA(wt)-XTEN-nCas9-NLS
(SEQ ID NO: 174)
MSEVEFSHEYWMRHALTLAKRAWDEREVPVGAVLVHNNRVIGEGW
NRPIGRHDPTAHAEIMALRQGGLVMQNYRLIDATLYVTLEPCVMC
AGAMIHSRIGRVVFGARDAKTGAAGSLMDVLHHPGMNHRVEITEG
ILADECAALLSDFFRMRRQEIKAQKKAQSSTDSGSETPGTSESAT
PESDKKYSIGLAIGTNSVGWAVITDEYKVPSKKFKVLGNTDRHSI
KKNLIGALLFDSGETAEATRLKRTARRRYTRRKNRICYLQEIFSN
EMAKVDDSFFHRLEESFLVEEDKKHERHPIFGNIVDEVAYHEKYP
TIYHLRKKLVDSTDKADLRLIYLALAHMIKFRGHFLIEGDLNPDN
SDVDKLFIQLVQTYNQLFEENPINASGVDAKAILSARLSKSRRLE
NLIAQLPGEKKNGLFGNLIALSLGLTPNFKSNFDLAEDAKLQLSK
DTYDDDLDNLLAQIGDQYADLFLAAKNLSDAILLSDILRVNTEIT
KAPLSASMIKRYDEHHQDLTLLKALVRQQLPEKYKEIFFDQSKNG
YAGYIDGGASQEEFYKFIKPILEKMDGTEELLVKLNREDLLRKQR
TFDNGSIPHQIHLGELHAILRRQEDFYPFLKDNREKIEKILTFRI
PYYVGPLARGNSRFAWMTRKSEETITPWNFEEVVDKGASAQSFIE
RMTNFDKNLPNEKVLPKHSLLYEYFTVYNELTKVKYVTEGMRKPA
FLSGEQKKAIVDLLFKTNRKVTVKQLKEDYFKKIECFDSVEISGV
EDRFNASLGTYHDLLKIIKDKDFLDNEENEDILEDIVLTLTLFED
REMIEERLKTYAHLFDDKVMKQLKRRRYTGWGRLSRKLINGIRDK
QSGKTILDFLKSDGFANRNFMQLIHDDSLTFKEDIQKAQVSGQGD
SLHEHIANLAGSPAIKKGILQTVKVVDELVKVMGRHKPENIVIEM
ARENQTTQKGQKNSRERMKRIEEGIKELGSQILKEHPVENTQLQN
EKLYLYYLQNGRDMYVDQELDINRLSDYDVDHIVPQSFLKDDSID
NKVLTRSDKNRGKSDNVPSEEVVKKMKNYWRQLLNAKLITQRKFD
NLTKAERGGLSELDKAGFIKRQLVETRQITKHVAQILDSRMNTKY
DENDKLIREVKVITLKSKLVSDFRKDFQFYKVREINNYHHAHDAY
LNAVVGTALIKKYPKLESEFVYGDYKVYDVRKMIAKSEQEIGKAT
AKYFFYSNIMNFFKTEITLANGEIRKRPLIETNGETGEIVWDKGR
DFATVRKVLSMPQVNIVKKTEVQTGGFSKESILPKRNSDKLIARK
KDWDPKKYGGFDSPTVAYSVLVVAKVEKGKSKKLKSVKELLGITI
MERSSFEKNPIDFLEAKGYKEVKKDLIIKLPKYSLFELENGRKRM
LASAGELQKGNELALPSKYVNFLYLASHYEKLKGSPEDNEQKQLF
VEQHKHYLDEIIEQISEFSKRVILADANLDKVLSAYNKHRDKPIR
EQAENIIHLFTLTNLGAPAAFKYFDTTIDRKRYTSTKEVLDATLI
HQSITGLYETRIDLSQLGGDSGGSPKKKRKV
ecTadA(D108N)-XTEN-nCas9-NLS
(mammalian construct, active on DNA,
A to G editing):
(SEQ ID NO: 175)
MSEVEFSHEYWMRHALTLAKRAWDEREVPVGAVLVHNNRVIGEGW
NRPIGRHDPTAHAEIMALRQGGLVMQNYRLIDATLYVTLEPCVMC
AGAMIHSRIGRVVFGARNAKTGAAGSLMDVLHHPGMNHRVEITEG
ILADECAALLSDFFRMRRQEIKAQKKAQSSTDSGSETPGTSESAT
PESDKKYSIGLAIGTNSVGWAVITDEYKVPSKKFKVLGNTDRHSI
KKNLIGALLFDSGETAEATRLKRTARRRYTRRKNRICYLQEIFSN
EMAKVDDSFFHRLEESFLVEEDKKHERHPIFGNIVDEVAYHEKYP
TIYHLRKKLVDSTDKADLRLIYLALAHMIKFRGHFLIEGDLNPDN
SDVDKLFIQLVQTYNQLFEENPINASGVDAKAILSARLSKSRRLE
NLIAQLPGEKKNGLFGNLIALSLGLTPNFKSNFDLAEDAKLQLSK
DTYDDDLDNLLAQIGDQYADLFLAAKNLSDAILLSDILRVNTEIT
KAPLSASMIKRYDEHHQDLTLLKALVRQQLPEKYKEIFFDQSKNG
YAGYIDGGASQEEFYKFIKPILEKMDGTEELLVKLNREDLLRKQR
TFDNGSIPHQIHLGELHAILRRQEDFYPFLKDNREKIEKILTFRI
PYYVGPLARGNSRFAWMTRKSEETITPWNFEEVVDKGASAQSFIE
RMTNFDKNLPNEKVLPKHSLLYEYFTVYNELTKVKYVTEGMRKPA
FLSGEQKKAIVDLLFKTNRKVTVKQLKEDYFKKIECFDSVEISGV
EDRFNASLGTYHDLLKIIKDKDFLDNEENEDILEDIVLTLTLFED
REMIEERLKTYAHLFDDKVMKQLKRRRYTGWGRLSRKLINGIRDK
QSGKTILDFLKSDGFANRNFMQLIHDDSLTFKEDIQKAQVSGQGD
SLHEHIANLAGSPAIKKGILQTVKVVDELVKVMGRHKPENIVIEM
ARENQTTQKGQKNSRERMKRIEEGIKELGSQILKEHPVENTQLQN
EKLYLYYLQNGRDMYVDQELDINRLSDYDVDHIVPQSFLKDDSID
NKVLTRSDKNRGKSDNVPSEEVVKKMKNYWRQLLNAKLITQRKFD
NLTKAERGGLSELDKAGFIKRQLVETRQITKHVAQILDSRMNTKY
DENDKLIREVKVITLKSKLVSDFRKDFQFYKVREINNYHHAHDAY
LNAVVGTALIKKYPKLESEFVYGDYKVYDVRKMIAKSEQEIGKAT
AKYFFYSNIMNFFKTEITLANGEIRKRPLIETNGETGEIVWDKGR
DFATVRKVLSMPQVNIVKKTEVQTGGFSKESILPKRNSDKLIARK
KDWDPKKYGGFDSPTVAYSVLVVAKVEKGKSKKLKSVKELLGITI
MERSSFEKNPIDFLEAKGYKEVKKDLIIKLPKYSLFELENGRKRM
LASAGELQKGNELALPSKYVNFLYLASHYEKLKGSPEDNEQKQLF
VEQHKHYLDEIIEQISEFSKRVILADANLDKVLSAYNKHRDKPIR
EQAENIIHLFTLTNLGAPAAFKYFDTTIDRKRYTSTKEVLDATLI
HQSITGLYETRIDLSQLGGDSGGSPKKKRKV
ecTadA(D108G)-XTEN-nCas9-NLS
(mammalian construct, active on DNA,
A to G editing):
(SEQ ID NO: 176)
MSEVEFSHEYWMRHALTLAKRAWDEREVPVGAVLVHNNRVIGEGW
NRPIGRHDPTAHAEIMALRQGGLVMQNYRLIDATLYVTLEPCVMC
AGAMIHSRIGRVVFGARGAKTGAAGSLMDVLHHPGMNHRVEITEG
ILADECAALLSDFFRMRRQEIKAQKKAQSSTDSGSETPGTSESAT
PESDKKYSIGLAIGTNSVGWAVITDEYKVPSKKFKVLGNTDRHSI
KKNLIGALLFDSGETAEATRLKRTARRRYTRRKNRICYLQEIFSN
EMAKVDDSFFHRLEESFLVEEDKKHERHPIFGNIVDEVAYHEKYP
TIYHLRKKLVDSTDKADLRLIYLALAHMIKFRGHFLIEGDLNPDN
SDVDKLFIQLVQTYNQLFEENPINASGVDAKAILSARLSKSRRLE
NLIAQLPGEKKNGLFGNLIALSLGLTPNFKSNFDLAEDAKLQLSK
DTYDDDLDNLLAQIGDQYADLFLAAKNLSDAILLSDILRVNTEIT
KAPLSASMIKRYDEHHQDLTLLKALVRQQLPEKYKEIFFDQSKNG
YAGYIDGGASQEEFYKFIKPILEKMDGTEELLVKLNREDLLRKQR
TFDNGSIPHQIHLGELHAILRRQEDFYPFLKDNREKIEKILTFRI
PYYVGPLARGNSRFAWMTRKSEETITPWNFEEVVDKGASAQSFIE
RMTNFDKNLPNEKVLPKHSLLYEYFTVYNELTKVKYVTEGMRKPA
FLSGEQKKAIVDLLFKTNRKVTVKQLKEDYFKKIECFDSVEISGV
EDRFNASLGTYHDLLKIIKDKDFLDNEENEDILEDIVLTLTLFED
REMIEERLKTYAHLFDDKVMKQLKRRRYTGWGRLSRKLINGIRDK
QSGKTILDFLKSDGFANRNFMQLIHDDSLTFKEDIQKAQVSGQGD
SLHEHIANLAGSPAIKKGILQTVKVVDELVKVMGRHKPENIVIEM
ARENQTTQKGQKNSRERMKRIEEGIKELGSQILKEHPVENTQLQN
EKLYLYYLQNGRDMYVDQELDINRLSDYDVDHIVPQSFLKDDSID
NKVLTRSDKNRGKSDNVPSEEVVKKMKNYWRQLLNAKLITQRKFD
NLTKAERGGLSELDKAGFIKRQLVETRQITKHVAQILDSRMNTKY
DENDKLIREVKVITLKSKLVSDFRKDFQFYKVREINNYHHAHDAY
LNAVVGTALIKKYPKLESEFVYGDYKVYDVRKMIAKSEQEIGKAT
AKYFFYSNIMNFFKTEITLANGEIRKRPLIETNGETGEIVWDKGR
DFATVRKVLSMPQVNIVKKTEVQTGGFSKESILPKRNSDKLIARK
KDWDPKKYGGFDSPTVAYSVLVVAKVEKGKSKKLKSVKELLGITI
MERSSFEKNPIDFLEAKGYKEVKKDLIIKLPKYSLFELENGRKRM
LASAGELQKGNELALPSKYVNFLYLASHYEKLKGSPEDNEQKQLF
VEQHKHYLDEIIEQISEFSKRVILADANLDKVLSAYNKHRDKPIR
EQAENIIHLFTLTNLGAPAAFKYFDTTIDRKRYTSTKEVLDATLI
HQSITGLYETRIDLSQLGGDSGGSPKKKRKV
ecTadA(D108V)-XTEN-nCas9-NLS
(mammalian construct, active on DNA,
A to G editing):
(SEQ ID NO: 177)
MSEVEFSHEYWMRHALTLAKRAWDEREVPVGAVLVHNNRVIGEGW
NRPIGRHDPTAHAEIMALRQGGLVMQNYRLIDATLYVTLEPCVMC
AGAMIHSRIGRVVFGARVAKTGAAGSLMDVLHHPGMNHRVEITEG
ILADECAALLSDFFRMRRQEIKAQKKAQSSTDSGSETPGTSESAT
PESDKKYSIGLAIGTNSVGWAVITDEYKVPSKKFKVLGNTDRHSI
KKNLIGALLFDSGETAEATRLKRTARRRYTRRKNRICYLQEIFSN
EMAKVDDSFFHRLEESFLVEEDKKHERHPIFGNIVDEVAYHEKYP
TIYHLRKKLVDSTDKADLRLIYLALAHMIKFRGHFLIEGDLNPDN
SDVDKLFIQLVQTYNQLFEENPINASGVDAKAILSARLSKSRRLE
NLIAQLPGEKKNGLFGNLIALSLGLTPNFKSNFDLAEDAKLQLSK
DTYDDDLDNLLAQIGDQYADLFLAAKNLSDAILLSDILRVNTEIT
KAPLSASMIKRYDEHHQDLTLLKALVRQQLPEKYKEIFFDQSKNG
YAGYIDGGASQEEFYKFIKPILEKMDGTEELLVKLNREDLLRKQR
TFDNGSIPHQIHLGELHAILRRQEDFYPFLKDNREKIEKILTFRI
PYYVGPLARGNSRFAWMTRKSEETITPWNFEEVVDKGASAQSFIE
RMTNFDKNLPNEKVLPKHSLLYEYFTVYNELTKVKYVTEGMRKPA
FLSGEQKKAIVDLLFKTNRKVTVKQLKEDYFKKIECFDSVEISGV
EDRFNASLGTYHDLLKIIKDKDFLDNEENEDILEDIVLTLTLFED
REMIEERLKTYAHLFDDKVMKQLKRRRYTGWGRLSRKLINGIRDK
QSGKTILDFLKSDGFANRNFMQLIHDDSLTFKEDIQKAQVSGQGD
SLHEHIANLAGSPAIKKGILQTVKVVDELVKVMGRHKPENIVIEM
ARENQTTQKGQKNSRERMKRIEEGIKELGSQILKEHPVENTQLQN
EKLYLYYLQNGRDMYVDQELDINRLSDYDVDHIVPQSFLKDDSID
NKVLTRSDKNRGKSDNVPSEEVVKKMKNYWRQLLNAKLITQRKFD
NLTKAERGGLSELDKAGFIKRQLVETRQITKHVAQILDSRMNTKY
DENDKLIREVKVITLKSKLVSDFRKDFQFYKVREINNYHHAHDAY
LNAVVGTALIKKYPKLESEFVYGDYKVYDVRKMIAKSEQEIGKAT
AKYFFYSNIMNFFKTEITLANGEIRKRPLIETNGETGEIVWDKGR
DFATVRKVLSMPQVNIVKKTEVQTGGFSKESILPKRNSDKLIARK
KDWDPKKYGGFDSPTVAYSVLVVAKVEKGKSKKLKSVKELLGITI
MERSSFEKNPIDFLEAKGYKEVKKDLIIKLPKYSLFELENGRKRM
LASAGELQKGNELALPSKYVNFLYLASHYEKLKGSPEDNEQKQLF
VEQHKHYLDEIIEQISEFSKRVILADANLDKVLSAYNKHRDKPIR
EQAENIIHLFTLTNLGAPAAFKYFDTTIDRKRYTSTKEVLDATLI
HQSITGLYETRIDLSQLGGDSGGSPKKKRKV
ecTadA(H8Y_D108N_N127S)-XTEN-dCas9
(variant resulting from first round of
evolution in bacteria):
(SEQ ID NO: 178)
MSEVEFSYEYWMRHALTLAKRAWDEREVPVGAVLVHNNRVIGEGW
NRPIGRHDPTAHAEIMALRQGGLVMQNYRLIDATLYVTLEPCVMC
AGAMIHSRIGRVVFGARNAKTGAAGSLMDVLHHPGMSHRVEITEG
ILADECAALLSDFFRMRRQEIKAQKKAQSSTDSGSETPGTSESAT
PESDKKYSIGLAIGTNSVGWAVITDEYKVPSKKFKVLGNTDRHSI
KKNLIGALLFDSGETAEATRLKRTARRRYTRRKNRICYLQEIFSN
EMAKVDDSFFHRLEESFLVEEDKKHERHPIFGNIVDEVAYHEKYP
TIYHLRKKLVDSTDKADLRLIYLALAHMIKFRGHFLIEGDLNPDN
SDVDKLFIQLVQTYNQLFEENPINASGVDAKAILSARLSKSRRLE
NLIAQLPGEKKNGLFGNLIALSLGLTPNFKSNFDLAEDAKLQLSK
DTYDDDLDNLLAQIGDQYADLFLAAKNLSDAILLSDILRVNTEIT
KAPLSASMIKRYDEHHQDLTLLKALVRQQLPEKYKEIFFDQSKNG
YAGYIDGGASQEEFYKFIKPILEKMDGTEELLVKLNREDLLRKQR
TFDNGSIPHQIHLGELHAILRRQEDFYPFLKDNREKIEKILTFRI
PYYVGPLARGNSRFAWMTRKSEETITPWNFEEVVDKGASAQSFIE
RMTNFDKNLPNEKVLPKHSLLYEYFTVYNELTKVKYVTEGMRKPA
FLSGEQKKAIVDLLFKTNRKVTVKQLKEDYFKKIECFDSVEISGV
EDRFNASLGTYHDLLKIIKDKDFLDNEENEDILEDIVLTLTLFED
REMIEERLKTYAHLFDDKVMKQLKRRRYTGWGRLSRKLINGIRDK
QSGKTILDFLKSDGFANRNFMQLIHDDSLTFKEDIQKAQVSGQGD
SLHEHIANLAGSPAIKKGILQTVKVVDELVKVMGRHKPENIVIEM
ARENQTTQKGQKNSRERMKRIEEGIKELGSQILKEHPVENTQLQN
EKLYLYYLQNGRDMYVDQELDINRLSDYDVDAIVPQSFLKDDSID
NKVLTRSDKNRGKSDNVPSEEVVKKMKNYWRQLLNAKLITQRKFD
NLTKAERGGLSELDKAGFIKRQLVETRQITKHVAQILDSRMNTKY
DENDKLIREVKVITLKSKLVSDFRKDFQFYKVREINNYHHAHDAY
LNAVVGTALIKKYPKLESEFVYGDYKVYDVRKMIAKSEQEIGKAT
AKYFFYSNIMNFFKTEITLANGEIRKRPLIETNGETGEIVWDKGR
DFATVRKVLSMPQVNIVKKTEVQTGGFSKESILPKRNSDKLIARK
KDWDPKKYGGFDSPTVAYSVLVVAKVEKGKSKKLKSVKELLGITI
MERSSFEKNPIDFLEAKGYKEVKKDLIIKLPKYSLFELENGRKRM
LASAGELQKGNELALPSKYVNFLYLASHYEKLKGSPEDNEQKQLF
VEQHKHYLDEIIEQISEFSKRVILADANLDKVLSAYNKHRDKPIR
EQAENIIHLFTLTNLGAPAAFKYFDTTIDRKRYTSTKEVLDATLI
HQSITGLYETRIDLSQLGGD
(H8Y_D108N_N127S_E155X)-XTEN-dCas9;
X = D, G or V
(Enriched variants from second round of
evolution (in bacteria) ecTadA):
(SEQ ID NO: 179)
MSEVEFS [symbol] EYWMRHALTLAKRAWDEREVPVGAVLVHNNRVIGE
GWNRPIGRHDPTAHAEIMALRQGGLVMQNYRLIDATLYVTLEP
CVMCAGAMIHSRIGRVVFGAR [symbol] AKTGAAGSLMDVLHHPGM [symbol]
HRVEITEGILADECAALLSDFFRMRRQ [symbol] IKAQKKAQSSTD
SGSETPGTSESATPESDKKYSIGLAIGTNSVGWAVITDEYKVPSK
KFKVLGNTDRHSIKKNLIGALLFDSGETAEATRLKRTARRRYTRR
KNRICYLQEIFSNEMAKVDDSFFHRLEESFLVEEDKKHERHPIFG
NIVDEVAYHEKYPTIYHLRKKLVDSTDKADLRLIYLALAHMIKFR
GHFLIEGDLNPDNSDVDKLFIQLVQTYNQLFEENPINASGVDAKA
ILSARLSKSRRLENLIAQLPGEKKNGLFGNLIALSLGLTPNFKSN
FDLAEDAKLQLSKDTYDDDLDNLLAQIGDQYADLFLAAKNLSDAI
LLSDILRVNTEITKAPLSASMIKRYDEHHQDLTLLKALVRQQLPE
KYKEIFFDQSKNGYAGYIDGGASQEEFYKFIKPILEKMDGTEELL
VKLNREDLLRKQRTFDNGSIPHQIHLGELHAILRRQEDFYPFLKD
NREKIEKILTFRIPYYVGPLARGNSRFAWMTRKSEETITPWNFEE
VVDKGASAQSFIERMTNFDKNLPNEKVLPKHSLLYEYFTVYNELT
KVKYVTEGMRKPAFLSGEQKKAIVDLLFKTNRKVTVKQLKEDYFK
KIECFDSVEISGVEDRFNASLGTYHDLLKIIKDKDFLDNEENEDI
LEDIVLTLTLFEDREMIEERLKTYAHLFDDKVMKQLKRRRYTGWG
RLSRKLINGIRDKQSGKTILDFLKSDGFANRNFMQLIHDDSLTFK
EDIQKAQVSGQGDSLHEHIANLAGSPAIKKGILQTVKVVDELVKV
MGRHKPENIVIEMARENQTTQKGQKNSRERMKRIEEGIKELGSQI
LKEHPVENTQLQNEKLYLYYLQNGRDMYVDQELDINRLSDYDVDA
IVPQSFLKDDSIDNKVLTRSDKNRGKSDNVPSEEVVKKMKNYWRQ
LLNAKLITQRKFDNLTKAERGGLSELDKAGFIKRQLVETRQITKH
VAQILDSRMNTKYDENDKLIREVKVITLKSKLVSDFRKDFQFYKV
REINNYHHAHDAYLNAVVGTALIKKYPKLESEFVYGDYKVYDVRK
MIAKSEQEIGKATAKYFFYSNIMNFFKTEITLANGEIRKRPLIET
NGETGEIVWDKGRDFATVRKVLSMPQVNIVKKTEVQTGGFSKESI
LPKRNSDKLIARKKDWDPKKYGGFDSPTVAYSVLVVAKVEKGKSK
KLKSVKELLGITIMERSSFEKNPIDFLEAKGYKEVKKDLIKLPKY
SLFELENGRKRMLASAGELQKGNELALPSKYVNFLYLASHYEKLK
GSPEDNEQKQLFVEQHKHYLDEIIEQISEFSKRVILADANLDKVL
SAYNKHRDKPIREQAENIIHLFTLTNLGAPAAFKYFDTTIDRKRY
TSTKEVLDATLIHQSITGLYETRIDLSQLGGD
ABE7.7
ecTadA_{(wild-type)}-(SGGS)₂₋XTEN-(SGGS)₂-
ecTadA_{(W23L}_H36L_P48A_R51L_L84F_A106V_D108N_
_{H123Y}_S146C_D147Y_R152P_ E155V_1156F KIS7N)-(SGGS)₂-
XTEN-(SGGS)₂_nCas9_SGGS_NLS
(SEQ ID NO: 180)
MSEVEFSHEYWMRHALTLAKRAWDEREVPVGAVLVHNNRVIGEGW
NRPIGRHDPTAHAEIMALRQGGLVMQNYRLIDATLYVTLEPCVMC
AGAMIHSRIGRVVFGARDAKTGAAGSLMDVLHHPGMNHRVEITEG
ILADECAALLSDFFRMRRQEIKAQKKAQSSTDSGGSSGGSSGSET
PGTSESATPESSGGSSGGSSEVEFSHEYWMRHALTLAKRALDERE
VPVGAVLVLNNRVIGEGWNRAIGLHDPTAHAEIMALRQGGLVMQN
YRLIDATLYVTFEPCVMCAGAMIHSRIGRVVFGVRNAKTGAAGSL
MDVLHYPGMNHRVEITEGILADECAALLCYFFRMPRQVFNAQKKA
QSSTDSGGSSGGSSGSETPGTSESATPESSGGSSGGSD
KKYSIGLAIGTNSVGWAVITDEYKVPSKKFKVLGNTDRHSIKKNL
IGALLFDSGETAEATRLKRTARRRYTRRKNRICYLQEIFSNEMAK
VDDSFFHRLEESFLVEEDKKHERHPIFGNIVDEVAYHEKYPTIYH
LRKKLVDSTDKADLRLIYLALAHMIKFRGHFLIEGDLNPDNSDVD
KLFIQLVQTYNQLFEENPINASGVDAKAILSARLSKSRRLENLIA
QLPGEKKNGLFGNLIALSLGLTPNFKSNFDLAEDAKLQLSKDTYD
DDLDNLLAQIGDQYADLFLAAKNLSDAILLSDILRVNTEITKAPL
SASMIKRYDEHHQDLTLLKALVRQQLPEKYKEIFFDQSKNGYAGY
IDGGASQEEFYKFIKPILEKMDGTEELLVKLNREDLLRKQRTFDN
GSIPHQIHLGELHAILRRQEDFYPFLKDNREKIEKILTFRIPYYV
GPLARGNSRFAWMTRKSEETITPWNFEEVVDKGASAQSFIERMTN
FDKNLPNEKVLPKHSLLYEYFTVYNELTKVKYVTEGMRKPAFLSG
EQKKAIVDLLFKTNRKVTVKQLKEDYFKKIECFDSVEISGVEDRF
NASLGTYHDLLKIIKDKDFLDNEENEDILEDIVLTLTLFEDREMI
EERLKTYAHLFDDKVMKQLKRRRYTGWGRLSRKLINGIRDKQSGK
TILDFLKSDGFANRNFMQLIHDDSLTFKEDIQKAQVSGQGDSLHE
HIANLAGSPAIKKGILQTVKVVDELVKVMGRHKPENIVIEMAREN
QTTQKGQKNSRERMKRIEEGIKELGSQILKEHPVENTQLQNEKLY
LYYLQNGRDMYVDQELDINRLSDYDVDHIVPQSFLKDDSIDNKVL
TRSDKNRGKSDNVPSEEVVKKMKNYWRQLLNAKLITQRKFDNLTK
AERGGLSELDKAGFIKRQLVETRQITKHVAQILDSRMNTKYDEND
KLIREVKVITLKSKLVSDFRKDFQFYKVREINNYHHAHDAYLNAV
VGTALIKKYPKLESEFVYGDYKVYDVRKMIAKSEQEIGKATAKYF
FYSNIMNFFKTEITLANGEIRKRPLIETNGETGEIVWDKGRDFAT
VRKVLSMPQVNIVKKTEVQTGGFSKESILPKRNSDKLIARKKDWD
PKKYGGFDSPTVAYSVLVVAKVEKGKSKKLKSVKELLGITIMERS
SFEKNPIDFLEAKGYKEVKKDLIIKLPKYSLFELENGRKRMLASA
GELQKGNELALPSKYVNFLYLASHYEKLKGSPEDNEQKQLFVEQH
KHYLDEHIEQISEFSKRVILADANLDKVLSAYNKHRDKPIREQAE
NIIHLFTLTNLGAPAAFKYFDTTIDRKRYTSTKEVLDATLIHQSI
TGLYETRIDLSQLGGDSGGSPKKKRKV
pNMG-624
ecTadA_{(wild-type)}-32 a.a. linker-
ecTadA_{(W23R}_H36L_P48A_R51L_L84F_A106V_D108N_H123Y_
_{S146C}_Di47Y_Ri52P_Ei55v_ii56F_Ki57N)-24 a.a.
linker nCas9 SGGS _NLS
(SEQ ID NO: 181)
MSEVEFSHEYWMRHALTLAKRAWDEREVPVGAVLVHNNRVIGEGW
NRPIGRHDPTAHAEIMALRQGGLVMQNYRLIDATLYVTLEPCVMC
AGAMIHSRIGRVVFGARDAKTGAAGSLMDVLHHPGMNHRVEITEG
ILADECAALLSDFFRMRRQEIKAQKKAQSSTDSGGSSGGSSGSET
PGTSESATPESSGGSSGGSSEVEFSHEYWMRHALTLAKRARDERE
VPVGAVLVLNNRVIGEGWNRAIGLHDPTAHAEIMALRQGGLVMQN
YRLIDATLYVTFEPCVMCAGAMIHSRIGRVVFGVRNAKTGAAGSL
MDVLHYPGMNHRVEITEGILADECAALLCYFFRMPRQVFNAQKKA
QSSTDSGGSSGGSSGSETPGTSESATPESDKKYSIGLAIGTNSVG
WAVITDEYKVPSKKFKVLGNTDRHSIKKNLIGALLFDSGETAEAT
RLKRTARRRYTRRKNRICYLQEIFSNEMAKVDDSFFHRLEESFLV
EEDKKHERHPIFGNIVDEVAYHEKYPTIYHLRKKLVDSTDKADLR
LIYLALAHMIKFRGHFLIEGDLNPDNSDVDKLFIQLVQTYNQLFE
ENPINASGVDAKAILSARLSKSRRLENLIAQLPGEKKNGLFGNLI
ALSLGLTPNFKSNFDLAEDAKLQLSKDTYDDDLDNLLAQIGDQYA
DLFLAAKNLSDAILLSDILRVNTEITKAPLSASMIKRYDEHHQDL
TLLKALVRQQLPEKYKEIFFDQSKNGYAGYIDGGASQEEFYKFIK
PILEKMDGTEELLVKLNREDLLRKQRTFDNGSIPHQIHLGELHAI
LRRQEDFYPFLKDNREKIEKILTFRIPYYVGPLARGNSRFAWMTR
KSEETITPWNFEEVVDKGASAQSFIERMTNFDKNLPNEKVLPKHS
LLYEYFTVYNELTKVKYVTEGMRKPAFLSGEQKKAIVDLLFKTNR
KVTVKQLKEDYFKKIECFDSVEISGVEDRFNASLGTYHDLLKIIK
DKDFLDNEENEDILEDIVLTLTLFEDREMIEERLKTYAHLFDDKV
MKQLKRRRYTGWGRLSRKLINGIRDKQSGKTILDFLKSDGFANRN
FMQLIHDDSLTFKEDIQKAQVSGQGDSLHEHIANLAGSPAIKKGI
LQTVKVVDELVKVMGRHKPENIVIEMARENQTTQKGQKNSRERMK
RIEEGIKELGSQILKEHPVENTQLQNEKLYLYYLQNGRDMYVDQE
LDINRLSDYDVDHIVPQSFLKDDSIDNKVLTRSDKNRGKSDNVPS
EEVVKKMKNYWRQLLNAKLITQRKFDNLTKAERGGLSELDKAGFI
KRQLVETRQITKHVAQILDSRMNTKYDENDKLIREVKVITLKSKL
VSDFRKDFQFYKVREINNYHHAHDAYLNAVVGTALIKKYPKLESE
FVYGDYKVYDVRKMIAKSEQEIGKATAKYFFYSNIMNFFKTEITL
ANGEIRKRPLIETNGETGEIVWDKGRDFATVRKVLSMPQVNIVKK
TEVQTGGFSKESILPKRNSDKLIARKKDWDPKKYGGFDSPTVAYS
VLVVAKVEKGKSKKLKSVKELLGITIMERSSFEKNPIDFLEAKGY
KEVKKDLIIKLPKYSLFELENGRKRMLASAGELQKGNELALPSKY
VNFLYLASHYEKLKGSPEDNEQKQLFVEQHKHYLDEIIEQISEFS
KRVILADANLDKVLSAYNKHRDKPIREQAENIIHLFTLTNLGAPA
AFKYFDTTIDRKRYTSTKEVLDATLIHQSITGLYETRIDLSQLGG
DSGGSPKKKRKV
ABE3.2
ecTadA_{(wild-type)}-(SGGS)₂-XTEN-(SGGS)₂-
ecTadA_{(L84F}_A106V_D108N_H123Y_D147Y_E155V_1156F)-
(SGGS)₂-XTEN-(SGGS)₂_nCas9_SGGS_NLS
(SEQ ID NO: 182)
MSEVEFSHEYWMRHALTLAKRAWDEREVPVGAVLVHNNRVIGEGW
NRPIGRHDPTAHAEIMALRQGGLVMQNYRLIDATLYVTLEPCVMC
AGAMIHSRIGRVVFGARDAKTGAAGSLMDVLHHPGMNHRVEITEG
ILADECAALLSDFFRMRRQEIKAQKKAQSSTDSGGSSGGSSGSET
PGTSESATPESSGGSSGGSSEVEFSHEYWMRHALTLAKRAWDERE
VPVGAVLVHNNRVIGEGWNRPIGRHDPTAHAEIMALRQGGLVMQN
YRLIDATLYVTFEPCVMCAGAMIHSRIGRVVFGVRNAKTGAAGSL
MDVLHYPGMNHRVEITEGILADECAALLSYFFRMRRQVFKAQKKA
QSSTDSGGSSGGSSGSETPGTSESATPESSGGSSGGSDKKYSIGL
AIGTNSVGWAVITDEYKVPSKKFKVLGNTDRHSIKKNLIGALLFD
SGETAEATRLKRTARRRYTRRKNRICYLQEIFSNEMAKVDDSFFH
RLEESFLVEEDKKHERHPIFGNIVDEVAYHEKYPTIYHLRKKLVD
STDKADLRLIYLALAHMIKFRGHFLIEGDLNPDNSDVDKLFIQLV
QTYNQLFEENPINASGVDAKAILSARLSKSRRLENLIAQLPGEKK
NGLFGNLIALSLGLTPNFKSNFDLAEDAKLQLSKDTYDDDLDNLL
AQIGDQYADLFLAAKNLSDAILLSDILRVNTEITKAPLSASMIKR
YDEHHQDLTLLKALVRQQLPEKYKEIFFDQSKNGYAGYIDGGASQ
EEFYKFIKPILEKMDGTEELLVKLNREDLLRKQRTFDNGSIPHQI
HLGELHAILRRQEDFYPFLKDNREKIEKILTFRIPYYVGPLARGN
SRFAWMTRKSEETITPWNFEEVVDKGASAQSFIERMTNFDKNLPN
EKVLPKHSLLYEYFTVYNELTKVKYVTEGMRKPAFLSGEQKKAIV
DLLFKTNRKVTVKQLKEDYFKKIECFDSVEISGVEDRFNASLGTY
HDLLKIIKDKDFLDNEENEDILEDIVLTLTLFEDREMIEERLKTY
AHLFDDKVMKQLKRRRYTGWGRLSRKLINGIRDKQSGKTILDFLK
SDGFANRNFMQLIHDDSLTFKEDIQKAQVSGQGDSLHEHIANLAG
SPAIKKGILQTVKVVDELVKVMGRHKPENIVIEMARENQTTQKGQ
KNSRERMKRIEEGIKELGSQILKEHPVENTQLQNEKLYLYYLQNG
RDMYVDQELDINRLSDYDVDHIVPQSFLKDDSIDNKVLTRSDKNR
GKSDNVPSEEVVKKMKNYWRQLLNAKLITQRKFDNLTKAERGGLS
ELDKAGFIKRQLVETRQITKHVAQILDSRMNTKYDENDKLIREVK
VITLKSKLVSDFRKDFQFYKVREINNYHHAHDAYLNAVVGTALIK
KYPKLESEFVYGDYKVYDVRKMIAKSEQEIGKATAKYFFYSNIMN
FFKTEITLANGEIRKRPLIETNGETGEIVWDKGRDFATVRKVLSM
PQVNIVKKTEVQTGGFSKESILPKRNSDKLIARKKDWDPKKYGGF
DSPTVAYSVLVVAKVEKGKSKKLKSVKELLGITIMERSSFEKNPI
DFLEAKGYKEVKKDLIIKLPKYSLFELENGRKRMLASAGELQKGN
ELALPSKYVNFLYLASHYEKLKGSPEDNEQKQLFVEQHKHYLDEH
IEQISEFSKRVILADANLDKVLSAYNKHRDKPIREQAENIIHLFT
LTNLGAPAAFKYFDTTIDRKRYTSTKEVLDATLIHQSITGLYETR
IDLSQLGGDSGGSPKKKRKV
ABE5.3
ecTadA_{(wild-type)}-(SGGS)₂-XTEN-(SGGS)₂-
ecTadA_{(H36L}_R51L_L84F_A106V_D108N_H123Y_S146C_
_{D147Y}_E155V_I156F_K157N)-(SGGS)₂-XTEN-(SGGS)_
nCas9_SGGS_NLS
(SEQ ID NO: 183)
MSEVEFSHEYWMRHALTLAKRAWDEREVPVGAVLVHNNRVIGEGW
NRPIGRHDPTAHAEIMALRQGGLVMQNYRLIDATLYVTLEPCVMC
AGAMIHSRIGRVVFGARDAKTGAAGSLMDVLHHPGMNHRVEITEG
ILADECAALLSDFFRMRRQEIKAQKKAQSSTDSGGSSGGSSGSET
PGTSESATPESSGGSSGGSSEVEFSHEYWMRHALTLAKRAWDERE
VPVGAVLVLNNRVIGEGWNRPIGLHDPTAHAEIMALRQGGLVMQN
YRLIDATLYVTFEPCVMCAGAMIHSRIGRVVFGVRNAKTGAAGSL
MDVLHYPGMNHRVEITEGILADECAALLCYFFRMRRQVFNAQKKA
QSSTDSGGSSGGSSGSETPGTSESATPESSGGSSGGSDKKYSIGL
AIGTNSVGWAVITDEYKVPSKKFKVLGNTDRHSIKKNLIGALLFD
SGETAEATRLKRTARRRYTRRKNRICYLQEIFSNEMAKVDDSFFH
RLEESFLVEEDKKHERHPIFGNIVDEVAYHEKYPTIYHLRKKLVD
STDKADLRLIYLALAHMIKFRGHFLIEGDLNPDNSDVDKLFIQLV
QTYNQLFEENPINASGVDAKAILSARLSKSRRLENLIAQLPGEKK
NGLFGNLIALSLGLTPNFKSNFDLAEDAKLQLSKDTYDDDLDNLL
AQIGDQYADLFLAAKNLSDAILLSDILRVNTEITKAPLSASMIKR
YDEHHQDLTLLKALVRQQLPEKYKEIFFDQSKNGYAGYIDGGASQ
EEFYKFIKPILEKMDGTEELLVKLNREDLLRKQRTFDNGSIPHQI
HLGELHAILRRQEDFYPFLKDNREKIEKILTFRIPYYVGPLARGN
SRFAWMTRKSEETITPWNFEEVVDKGASAQSFIERMTNFDKNLPN
EKVLPKHSLLYEYFTVYNELTKVKYVTEGMRKPAFLSGEQKKAIV
DLLFKTNRKVTVKQLKEDYFKKIECFDSVEISGVEDRFNASLGTY
HDLLKIIKDKDFLDNEENEDILEDIVLTLTLFEDREMIEERLKTY
AHLFDDKVMKQLKRRRYTGWGRLSRKLINGIRDKQSGKTILDFLK
SDGFANRNFMQLIHDDSLTFKEDIQKAQVSGQGDSLHEHIANLAG
SPAIKKGILQTVKVVDELVKVMGRHKPENIVIEMARENQTTQKGQ
KNSRERMKRIEEGIKELGSQILKEHPVENTQLQNEKLYLYYLQNG
RDMYVDQELDINRLSDYDVDHIVPQSFLKDDSIDNKVLTRSDKNR
GKSDNVPSEEVVKKMKNYWRQLLNAKLITQRKFDNLTKAERGGLS
ELDKAGFIKRQLVETRQITKHVAQILDSRMNTKYDENDKLIREVK
VITLKSKLVSDFRKDFQFYKVREINNYHHAHDAYLNAVVGTALIK
KYPKLESEFVYGDYKVYDVRKMIAKSEQEIGKATAKYFFYSNIMN
FFKTEITLANGEIRKRPLIETNGETGEIVWDKGRDFATVRKVLSM
PQVNIVKKTEVQTGGFSKESILPKRNSDKLIARKKDWDPKKYGGF
DSPTVAYSVLVVAKVEKGKSKKLKSVKELLGITIMERSSFEKNPI
DFLEAKGYKEVKKDLIIKLPKYSLFELENGRKRMLASAGELQKGN
ELALPSKYVNFLYLASHYEKLKGSPEDNEQKQLFVEQHKHYLDEH
IEQISEFSKRVILADANLDKVLSAYNKHRDKPIREQAENIIHLFT
LTNLGAPAAFKYFDTTIDRKRYTSTKEVLDATLIHQSITGLYETR
IDLSQLGGD
SGGSPKKKRKV
pNMG-558
ecTadA(wild-type)- 32 a.a. linker-
ecTadA_{(H36L}_R51L_L84F_A106V_D108N_H123Y_S146C_D147Y_ E155V_1156F
_K157N)⁻ 24 a.a. linker nCas9 SGGS NLS
(SEQ ID NO: 184)
MSEVEFSHEYWMRHALTLAKRAWDEREVPVGAVLVHNNRVIGEGW
NRPIGRHDPTAHAEIMALRQGGLVMQNYRLIDATLYVTLEPCVMC
AGAMIHSRIGRVVFGARDAKTGAAGSLMDVLHHPGMNHRVEITEG
ILADECAALLSDFFRMRRQEIKAQKKAQSSTDSGGSSGGSSGSET
PGTSESATPESSGGSSGGSSEVEFSHEYWMRHALTLAKRAWDERE
VPVGAVLVLNNRVIGEGWNRPIGLHDPTAHAEIMALRQGGLVMQN
YRLIDATLYVTFEPCVMCAGAMIHSRIGRVVFGVRNAKTGAAGSL
MDVLHYPGMNHRVEITEGILADECAALLCYFFRMRRQVFNAQKKA
QSSTDSGGSSGGSSGSETPGTSESATPESDKKYSIGLAIGTNSVG
WAVITDEYKVPSKKFKVLGNTDRHSIKKNLIGALLFDSGETAEAT
RLKRTARRRYTRRKNRICYLQEIFSNEMAKVDDSFFHRLEESFLV
EEDKKHERHPIFGNIVDEVAYHEKYPTIYHLRKKLVDSTDKADLR
LIYLALAHMIKFRGHFLIEGDLNPDNSDVDKLFIQLVQTYNQLFE
ENPINASGVDAKAILSARLSKSRRLENLIAQLPGEKKNGLFGNLI
ALSLGLTPNFKSNFDLAEDAKLQLSKDTYDDDLDNLLAQIGDQYA
DLFLAAKNLSDAILLSDILRVNTEITKAPLSASMIKRYDEHHQDL
TLLKALVRQQLPEKYKEIFFDQSKNGYAGYIDGGASQEEFYKFIK
PILEKMDGTEELLVKLNREDLLRKQRTFDNGSIPHQIHLGELHAI
LRRQEDFYPFLKDNREKIEKILTFRIPYYVGPLARGNSRFAWMTR
KSEETITPWNFEEVVDKGASAQSFIERMTNFDKNLPNEKVLPKHS
LLYEYFTVYNELTKVKYVTEGMRKPAFLSGEQKKAIVDLLFKTNR
KVTVKQLKEDYFKKIECFDSVEISGVEDRFNASLGTYHDLLKIIK
DKDFLDNEENEDILEDIVLTLTLFEDREMIEERLKTYAHLFDDKV
MKQLKRRRYTGWGRLSRKLINGIRDKQSGKTILDFLKSDGFANRN
FMQLIHDDSLTFKEDIQKAQVSGQGDSLHEHIANLAGSPAIKKGI
LQTVKVVDELVKVMGRHKPENIVIEMARENQTTQKGQKNSRERMK
RIEEGIKELGSQILKEHPVENTQLQNEKLYLYYLQNGRDMYVDQE
LDINRLSDYDVDHIVPQSFLKDDSIDNKVLTRSDKNRGKSDNVPS
EEVVKKMKNYWRQLLNAKLITQRKFDNLTKAERGGLSELDKAGFI
KRQLVETRQITKHVAQILDSRMNTKYDENDKLIREVKVITLKSKL
VSDFRKDFQFYKVREINNYHHAHDAYLNAVVGTALIKKYPKLESE
FVYGDYKVYDVRKMIAKSEQEIGKATAKYFFYSNIMNFFKTEITL
ANGEIRKRPLIETNGETGEIVWDKGRDFATVRKVLSMPQVNIVKK
TEVQTGGFSKESILPKRNSDKLIARKKDWDPKKYGGFDSPTVAYS
VLVVAKVEKGKSKKLKSVKELLGITIMERSSFEKNPIDFLEAKGY
KEVKKDLIIKLPKYSLFELENGRKRMLASAGELQKGNELALPSKY
VNFLYLASHYEKLKGSPEDNEQKQLFVEQHKHYLDEIIEQISEFS
KRVILADANLDKVLSAYNKHRDKPIREQAENIIHLFTLTNLGAPA
AFKYFDTTIDRKRYTSTKEVLDATLIHQSITGLYETRIDLSQLGG
DSGGSPKKKRKV
pNMG-576
ecTadA(wild-type)-(SGGS)₂-XTEN-(SGGS)₂-
ecTadA_{(H36L}_P48S_R51L_L84F_A106V_D108N_
_{H123Y}_S146C_D147Y_E155V_I156F_K157N)-
(SGGS)₂-XTEN-(SGGS)_nCas9_GGSNLS
(SEQ ID NO: 185)
MSEVEFSHEYWMRHALTLAKRAWDEREVPVGAVLVHNNRVIGEGW
NRPIGRHDPTAHAEIMALRQGGLVMQNYRLIDATLYVTLEPCVMC
AGAMIHSRIGRVVFGARDAKTGAAGSLMDVLHHPGMNHRVEITEG
ILADECAALLSDFFRMRRQEIKAQKKAQSSTDSGGSSGGSSGSET
PGTSESATPESSGGSSGGSSEVEFSHEYWMRHALTLAKRAWDERE
VPVGAVLVLNNRVIGEGWNRSIGLHDPTAHAEIMALRQGGLVMQN
YRLIDATLYVTFEPCVMCAGAMIHSRIGRVVFGVRNAKTGAAGSL
MDVLHYPGMNHRVEITEGILADECAALLCYFFRMRRQVFNAQKKA
QSSTDSGGSSGGSSGSETPGTSESATPESSGGSSGGSDKKYSIGL
AIGTNSVGWAVITDEYKVPSKKFKVLGNTDRHSIKKNLIGALLFD
SGETAEATRLKRTARRRYTRRKNRICYLQEIFSNEMAKVDDSFFH
RLEESFLVEEDKKHERHPIFGNIVDEVAYHEKYPTIYHLRKKLVD
STDKADLRLIYLALAHMIKFRGHFLIEGDLNPDNSDVDKLFIQLV
QTYNQLFEENPINASGVDAKAILSARLSKSRRLENLIAQLPGEKK
NGLFGNLIALSLGLTPNFKSNFDLAEDAKLQLSKDTYDDDLDNLL
AQIGDQYADLFLAAKNLSDAILLSDILRVNTEITKAPLSASMIKR
YDEHHQDLTLLKALVRQQLPEKYKEIFFDQSKNGYAGYIDGGASQ
EEFYKFIKPILEKMDGTEELLVKLNREDLLRKQRTFDNGSIPHQI
HLGELHAILRRQEDFYPFLKDNREKIEKILTFRIPYYVGPLARGN
SRFAWMTRKSEETITPWNFEEVVDKGASAQSFIERMTNFDKNLPN
EKVLPKHSLLYEYFTVYNELTKVKYVTEGMRKPAFLSGEQKKAIV
DLLFKTNRKVTVKQLKEDYFKKIECFDSVEISGVEDRFNASLGTY
HDLLKIIKDKDFLDNEENEDILEDIVLTLTLFEDREMIEERLKTY
AHLFDDKVMKQLKRRRYTGWGRLSRKLINGIRDKQSGKTILDFLK
SDGFANRNFMQLIHDDSLTFKEDIQKAQVSGQGDSLHEHIANLAG
SPAIKKGILQTVKVVDELVKVMGRHKPENIVIEMARENQTTQKGQ
KNSRERMKRIEEGIKELGSQILKEHPVENTQLQNEKLYLYYLQNG
RDMYVDQELDINRLSDYDVDHIVPQSFLKDDSIDNKVLTRSDKNR
GKSDNVPSEEVVKKMKNYWRQLLNAKLITQRKFDNLTKAERGGLS
ELDKAGFIKRQLVETRQITKHVAQILDSRMNTKYDENDKLIREVK
VITLKSKLVSDFRKDFQFYKVREINNYHHAHDAYLNAVVGTALIK
KYPKLESEFVYGDYKVYDVRKMIAKSEQEIGKATAKYFFYSNIMN
FFKTEITLANGEIRKRPLIETNGETGEIVWDKGRDFATVRKVLSM
PQVNIVKKTEVQTGGFSKESILPKRNSDKLIARKKDWDPKKYGGF
DSPTVAYSVLVVAKVEKGKSKKLKSVKELLGITIMERSSFEKNPI
DFLEAKGYKEVKKDLIIKLPKYSLFELENGRKRMLASAGELQKGN
ELALPSKYVNFLYLASHYEKLKGSPEDNEQKQLFVEQHKHYLDEH
IEQISEFSKRVILADANLDKVLSAYNKHRDKPIREQAENIIHLFT
LTNLGAPAAFKYFDTTIDRKRYTSTKEVLDATLIHQSITGLYETR
IDLSQLGGD
SGGSPKKKRKV
pNMG-577
ecTadA(wild-type)-(SGGS)₂-XTEN-(SGGS)₂-
ecTadA_{(H36L}_P48S_R51L_L84F_A106V_D108N_H123Y_
_{A142N}_S146C_D147Y_E155V_I156F_K157N)-(SGGS)-XTEN-
(SGGS)₂_nCas9GGS_NLS
(SEQ ID NO: 186)
MSEVEFSHEYWMRHALTLAKRAWDEREVPVGAVLVHNNRVIGEGW
NRPIGRHDPTAHAEIMALRQGGLVMQNYRLIDATLYVTLEPCVMC
AGAMIHSRIGRVVFGARDAKTGAAGSLMDVLHHPGMNHRVEITEG
ILADECAALLSDFFRMRRQEIKAQKKAQSSTDSGGSSGGSSGSET
PGTSESATPESSGGSSGGSSEVEFSHEYWMRHALTLAKRAWDERE
VPVGAVLVLNNRVIGEGWNRSIGLHDPTAHAEIMALRQGGLVMQN
YRLIDATLYVTFEPCVMCAGAMIHSRIGRVVFGVRNAKTGAAGSL
MDVLHYPGMNHRVEITEGILADECNALLCYFFRMRRQVFNAQKKA
QSSTDSGGSSGGSSGSETPGTSESATPESSGGSSGGSDKKYSIGL
AIGTNSVGWAVITDEYKVPSKKFKVLGNTDRHSIKKNLIGALLFD
SGETAEATRLKRTARRRYTRRKNRICYLQEIFSNEMAKVDDSFFH
RLEESFLVEEDKKHERHPIFGNIVDEVAYHEKYPTIYHLRKKLVD
STDKADLRLIYLALAHMIKFRGHFLIEGDLNPDNSDVDKLFIQLV
QTYNQLFEENPINASGVDAKAILSARLSKSRRLENLIAQLPGEKK
NGLFGNLIALSLGLTPNFKSNFDLAEDAKLQLSKDTYDDDLDNLL
AQIGDQYADLFLAAKNLSDAILLSDILRVNTEITKAPLSASMIKR
YDEHHQDLTLLKALVRQQLPEKYKEIFFDQSKNGYAGYIDGGASQ
EEFYKFIKPILEKMDGTEELLVKLNREDLLRKQRTFDNGSIPHQI
HLGELHAILRRQEDFYPFLKDNREKIEKILTFRIPYYVGPLARGN
SRFAWMTRKSEETITPWNFEEVVDKGASAQSFIERMTNFDKNLPN
EKVLPKHSLLYEYFTVYNELTKVKYVTEGMRKPAFLSGEQKKAIV
DLLFKTNRKVTVKQLKEDYFKKIECFDSVEISGVEDRFNASLGTY
HDLLKIIKDKDFLDNEENEDILEDIVLTLTLFEDREMIEERLKTY
AHLFDDKVMKQLKRRRYTGWGRLSRKLINGIRDKQSGKTILDFLK
SDGFANRNFMQLIHDDSLTFKEDIQKAQVSGQGDSLHEHIANLAG
SPAIKKGILQTVKVVDELVKVMGRHKPENIVIEMARENQTTQKGQ
KNSRERMKRIEEGIKELGSQILKEHPVENTQLQNEKLYLYYLQNG
RDMYVDQELDINRLSDYDVDHIVPQSFLKDDSIDNKVLTRSDKNR
GKSDNVPSEEVVKKMKNYWRQLLNAKLITQRKFDNLTKAERGGLS
ELDKAGFIKRQLVETRQITKHVAQILDSRMNTKYDENDKLIREVK
VITLKSKLVSDFRKDFQFYKVREINNYHHAHDAYLNAVVGTALIK
KYPKLESEFVYGDYKVYDVRKMIAKSEQEIGKATAKYFFYSNIMN
FFKTEITLANGEIRKRPLIETNGETGEIVWDKGRDFATVRKVLSM
PQVNIVKKTEVQTGGFSKESILPKRNSDKLIARKKDWDPKKYGGF
DSPTVAYSVLVVAKVEKGKSKKLKSVKELLGITIMERSSFEKNPI
DFLEAKGYKEVKKDLIIKLPKYSLFELENGRKRMLASAGELQKGN
ELALPSKYVNFLYLASHYEKLKGSPEDNEQKQLFVEQHKHYLDEH
IEQISEFSKRVILADANLDKVLSAYNKHRDKPIREQAENIIHLFT
LTNLGAPAAFKYFDTTIDRKRYTSTKEVLDATLIHQSITGLYETR
IDLSQLGGD
SGGSPKKKRKV
pNMG-586
ecTadA(wild-type)-(SGGS)₂-XTEN-(SGGS)₂-
ecTadA_{(H36L}_P48A_R51L_L84F_A106V_D108N_
_{H123Y}_S146C_D147Y_E155V_I156F_K157N)⁻
(SGGS)₂-XTEN-(SGGS)₂_nCas9_GGS_NLS
(SEQ ID NO: 187)
MSEVEFSHEYWMRHALTLAKRAWDEREVPVGAVLVHNNRVIGEGW
NRPIGRHDPTAHAEIMALRQGGLVMQNYRLIDATLYVTLEPCVMC
AGAMIHSRIGRVVFGARDAKTGAAGSLMDVLHHPGMNHRVEITEG
ILADECAALLSDFFRMRRQEIKAQKKAQSSTDSGGSSGGSSGSET
PGTSESATPESSGGSSGGSSEVEFSHEYWMRHALTLAKRAWDERE
VPVGAVLVLNNRVIGEGWNRAIGLHDPTAHAEIMALRQGGLVMQN
YRLIDATLYVTFEPCVMCAGAMIHSRIGRVVFGVRNAKTGAAGSL
MDVLHYPGMNHRVEITEGILADECAALLCYFFRMRRQVFNAQKKA
QSSTDSGGSSGGSSGSETPGTSESATPESSGGSSGGSDKKYSIGL
AIGTNSVGWAVITDEYKVPSKKFKVLGNTDRHSIKKNLIGALLFD
SGETAEATRLKRTARRRYTRRKNRICYLQEIFSNEMAKVDDSFFH
RLEESFLVEEDKKHERHPIFGNIVDEVAYHEKYPTIYHLRKKLVD
STDKADLRLIYLALAHMIKFRGHFLIEGDLNPDNSDVDKLFIQLV
QTYNQLFEENPINASGVDAKAILSARLSKSRRLENLIAQLPGEKK
NGLFGNLIALSLGLTPNFKSNFDLAEDAKLQLSKDTYDDDLDNLL
AQIGDQYADLFLAAKNLSDAILLSDILRVNTEITKAPLSASMIKR
YDEHHQDLTLLKALVRQQLPEKYKEIFFDQSKNGYAGYIDGGASQ
EEFYKFIKPILEKMDGTEELLVKLNREDLLRKQRTFDNGSIPHQI
HLGELHAILRRQEDFYPFLKDNREKIEKILTFRIPYYVGPLARGN
SRFAWMTRKSEETITPWNFEEVVDKGASAQSFIERMTNFDKNLPN
EKVLPKHSLLYEYFTVYNELTKVKYVTEGMRKPAFLSGEQKKAIV
DLLFKTNRKVTVKQLKEDYFKKIECFDSVEISGVEDRFNASLGTY
HDLLKIIKDKDFLDNEENEDILEDIVLTLTLFEDREMIEERLKTY
AHLFDDKVMKQLKRRRYTGWGRLSRKLINGIRDKQSGKTILDFLK
SDGFANRNFMQLIHDDSLTFKEDIQKAQVSGQGDSLHEHIANLAG
SPAIKKGILQTVKVVDELVKVMGRHKPENIVIEMARENQTTQKGQ
KNSRERMKRIEEGIKELGSQILKEHPVENTQLQNEKLYLYYLQNG
RDMYVDQELDINRLSDYDVDHIVPQSFLKDDSIDNKVLTRSDKNR
GKSDNVPSEEVVKKMKNYWRQLLNAKLITQRKFDNLTKAERGGLS
ELDKAGFIKRQLVETRQITKHVAQILDSRMNTKYDENDKLIREVK
VITLKSKLVSDFRKDFQFYKVREINNYHHAHDAYLNAVVGTALIK
KYPKLESEFVYGDYKVYDVRKMIAKSEQEIGKATAKYFFYSNIMN
FFKTEITLANGEIRKRPLIETNGETGEIVWDKGRDFATVRKVLSM
PQVNIVKKTEVQTGGFSKESILPKRNSDKLIARKKDWDPKKYGGF
DSPTVAYSVLVVAKVEKGKSKKLKSVKELLGITIMERSSFEKNPI
DFLEAKGYKEVKKDLIIKLPKYSLFELENGRKRMLASAGELQKGN
ELALPSKYVNFLYLASHYEKLKGSPEDNEQKQLFVEQHKHYLDEH
IEQISEFSKRVILADANLDKVLSAYNKHRDKPIREQAENIIHLFT
LTNLGAPAAFKYFDTTIDRKRYTSTKEVLDATLIHQSITGLYETR
IDLSQLGGD
SGGSPKKKRKV
ABE7.2
ecTadA(wild-type)-(SGGS)₂-XTEN-(SGGS)₂-
ecTadA_{(H36L}_P48A_R51L_L84F_A106V_D108N_
_{H123Y}_A142N_S146C_D147Y_E155V_I156F K157N)-
(SGGS)₂-XTEN-(SGGS)₂_nCas9_GGS_NLS
(SEQ ID NO: 188)
MSEVEFSHEYWMRHALTLAKRAWDEREVPVGAVLVHNNRVIGEGW
NRPIGRHDPTAHAEIMALRQGGLVMQNYRLIDATLYVTLEPCVMC
AGAMIHSRIGRVVFGARDAKTGAAGSLMDVLHHPGMNHRVEITEG
ILADECAALLSDFFRMRRQEIKAQKKAQSSTDSGGSSGGSSGSET
PGTSESATPESSGGSSGGSSEVEFSHEYWMRHALTLAKRAWDERE
VPVGAVLVLNNRVIGEGWNRAIGLHDPTAHAEIMALRQGGLVMQN
YRLIDATLYVTFEPCVMCAGAMIHSRIGRVVFGVRNAKTGAAGSL
MDVLHYPGMNHRVEITEGILADECNALLCYFFRMRRQVFNAQKKA
QSSTDSGGSSGGSSGSETPGTSESATPESSGGSSGGSDKKYSIGL
AIGTNSVGWAVITDEYKVPSKKFKVLGNTDRHSIKKNLIGALLFD
SGETAEATRLKRTARRRYTRRKNRICYLQEIFSNEMAKVDDSFFH
RLEESFLVEEDKKHERHPIFGNIVDEVAYHEKYPTIYHLRKKLVD
STDKADLRLIYLALAHMIKFRGHFLIEGDLNPDNSDVDKLFIQLV
QTYNQLFEENPINASGVDAKAILSARLSKSRRLENLIAQLPGEKK
NGLFGNLIALSLGLTPNFKSNFDLAEDAKLQLSKDTYDDDLDNLL
AQIGDQYADLFLAAKNLSDAILLSDILRVNTEITKAPLSASMIKR
YDEHHQDLTLLKALVRQQLPEKYKEIFFDQSKNGYAGYIDGGASQ
EEFYKFIKPILEKMDGTEELLVKLNREDLLRKQRTFDNGSIPHQI
HLGELHAILRRQEDFYPFLKDNREKIEKILTFRIPYYVGPLARGN
SRFAWMTRKSEETITPWNFEEVVDKGASAQSFIERMTNFDKNLPN
EKVLPKHSLLYEYFTVYNELTKVKYVTEGMRKPAFLSGEQKKAIV
DLLFKTNRKVTVKQLKEDYFKKIECFDSVEISGVEDRFNASLGTY
HDLLKIIKDKDFLDNEENEDILEDIVLTLTLFEDREMIEERLKTY
AHLFDDKVMKQLKRRRYTGWGRLSRKLINGIRDKQSGKTILDFLK
SDGFANRNFMQLIHDDSLTFKEDIQKAQVSGQGDSLHEHIANLAG
SPAIKKGILQTVKVVDELVKVMGRHKPENIVIEMARENQTTQKGQ
KNSRERMKRIEEGIKELGSQILKEHPVENTQLQNEKLYLYYLQNG
RDMYVDQELDINRLSDYDVDHIVPQSFLKDDSIDNKVLTRSDKNR
GKSDNVPSEEVVKKMKNYWRQLLNAKLITQRKFDNLTKAERGGLS
ELDKAGFIKRQLVETRQITKHVAQILDSRMNTKYDENDKLIREVK
VITLKSKLVSDFRKDFQFYKVREINNYHHAHDAYLNAVVGTALIK
KYPKLESEFVYGDYKVYDVRKMIAKSEQEIGKATAKYFFYSNIMN
FFKTEITLANGEIRKRPLIETNGETGEIVWDKGRDFATVRKVLM
PQVNIVKKTEVQTGGFSKESILPKRNSDKLIARKKDWDPKKYGGF
DSPTVAYSVLVVAKVEKGKSKKLKSVKELLGITIMERSSFEKNPI
DFLEAKGYKEVKKDLIIKLPKYSLFELENGRKRMLASAGELQKGN
ELALPSKYVNFLYLASHYEKLKGSPEDNEQKQLFVEQHKHYLDEI
IEQISEFSKRVILADANLDKVLSAYNKHRDKPIREQAENIIHLFT
LTNLGAPAAFKYFDTTIDRKRYTSTKEVLDATLIHQSITGLYETR
IDLSQLGGD
SGGSPKKKRKV
pNMG-620
ecTadA_{(wild-type)}-(SGGS)₂-XTEN-(SGGS)₂-
ecTadA_{(W23R}_H36L_P48A_R51L_L84F_A106V_D108N_
_{H123Y}_S146C_D147Y_R152P_E155V_I156F K157N)-
(SGGS)-XTEN-(SGGS)₂_nCas9GGS_NLS
(SEQ ID NO: 189)
MSEVEFSHEYWMRHALTLAKRAWDEREVPVGAVLVHNNRVIGEGW
NRPIGRHDPTAHAEIMALRQGGLVMQNYRLIDATLYVTLEPCVMC
AGAMIHSRIGRVVFGARDAKTGAAGSLMDVLHHPGMNHRVEITEG
ILADECAALLSDFFRMRRQEIKAQKKAQSSTDSGGSSGGSSGSET
PGTSESATPESSGGSSGGSSEVEFSHEYWMRHALTLAKRARDERE
VPVGAVLVLNNRVIGEGWNRAIGLHDPTAHAEIMALRQGGLVMQN
YRLIDATLYVTFEPCVMCAGAMIHSRIGRVVFGVRNAKTGAAGSL
MDVLHYPGMNHRVEITEGILADECAALLCYFFRMPRQVFNAQKKA
QSSTDSGGSSGGSSGSETPGTSESATPESSGGSSGGSDKKYSIGL
AIGTNSVGWAVITDEYKVPSKKFKVLGNTDRHSIKKNLIGALLFD
SGETAEATRLKRTARRRYTRRKNRICYLQEIFSNEMAKVDDSFFH
RLEESFLVEEDKKHERHPIFGNIVDEVAYHEKYPTIYHLRKKLVD
STDKADLRLIYLALAHMIKFRGHFLIEGDLNPDNSDVDKLFIQLV
QTYNQLFEENPINASGVDAKAILSARLSKSRRLENLIAQLPGEKK
NGLFGNLIALSLGLTPNFKSNFDLAEDAKLQLSKDTYDDDLDNLL
AQIGDQYADLFLAAKNLSDAILLSDILRVNTEITKAPLSASMIKR
YDEHHQDLTLLKALVRQQLPEKYKEIFFDQSKNGYAGYIDGGASQ
EEFYKFIKPILEKMDGTEELLVKLNREDLLRKQRTFDNGSIPHQI
HLGELHAILRRQEDFYPFLKDNREKIEKILTFRIPYYVGPLARGN
SRFAWMTRKSEETITPWNFEEVVDKGASAQSFIERMTNFDKNLPN
EKVLPKHSLLYEYFTVYNELTKVKYVTEGMRKPAFLSGEQKKAIV
DLLFKTNRKVTVKQLKEDYFKKIECFDSVEISGVEDRFNASLGTY
HDLLKIIKDKDFLDNEENEDILEDIVLTLTLFEDREMIEERLKTY
AHLFDDKVMKQLKRRRYTGWGRLSRKLINGIRDKQSGKTILDFLK
SDGFANRNFMQLIHDDSLTFKEDIQKAQVSGQGDSLHEHIANLAG
SPAIKKGILQTVKVVDELVKVMGRHKPENIVIEMARENQTTQKGQ
KNSRERMKRIEEGIKELGSQILKEHPVENTQLQNEKLYLYYLQNG
RDMYVDQELDINRLSDYDVDHIVPQSFLKDDSIDNKVLTRSDKNR
GKSDNVPSEEVVKKMKNYWRQLLNAKLITQRKFDNLTKAERGGLS
ELDKAGFIKRQLVETRQITKHVAQILDSRMNTKYDENDKLIREVK
VITLKSKLVSDFRKDFQFYKVREINNYHHAHDAYLNAVVGTALIK
KYPKLESEFVYGDYKVYDVRKMIAKSEQEIGKATAKYFFYSNIMN
FFKTEITLANGEIRKRPLIETNGETGEIVWDKGRDFATVRKVLSM
PQVNIVKKTEVQTGGFSKESILPKRNSDKLIARKKDWDPKKYGGF
DSPTVAYSVLVVAKVEKGKSKKLKSVKELLGITIMERSSFEKNPI
DFLEAKGYKEVKKDLIIKLPKYSLFELENGRKRMLASAGELQKGN
ELALPSKYVNFLYLASHYEKLKGSPEDNEQKQLFVEQHKHYLDEI
IEQISEFSKRVILADANLDKVLSAYNKHRDKPIREQAENIIHLFT
LTNLGAPAAFKYFDTTIDRKRYTSTKEVLDATLIHQSITGLYETR
IDLSQLGGD
SGGSPKKKRKV
pNMG-617
ecTadA_{(wild-type)}-(SGGS)₂-XTEN-(SGGS)₂-
ecTadA_{(W23L}_H36L_P48A_R51L_L84F_A1Q6V_D1Q8N_
_{H123Y}_A142A_S146C_D147Y_E155V_I156F K157N)-
(SGGS)-XTEN-(SGGS)₂_nCas9GGS_NLS
(SEQ ID NO: 190)
MSEVEFSHEYWMRHALTLAKRAWDEREVPVGAVLVHNNRVIGEGW
NRPIGRHDPTAHAEIMALRQGGLVMQNYRLIDATLYVTLEPCVMC
AGAMIHSRIGRVVFGARDAKTGAAGSLMDVLHHPGMNHRVEITEG
ILADECAALLSDFFRMRRQEIKAQKKAQSSTDSGGSSGGSSGSET
PGTSESATPESSGGSSGGSSEVEFSHEYWMRHALTLAKRALDERE
VPVGAVLVLNNRVIGEGWNRAIGLHDPTAHAEIMALRQGGLVMQN
YRLIDATLYVTFEPCVMCAGAMIHSRIGRVVFGVRNAKTGAAGSL
MDVLHYPGMNHRVEITEGILADECNALLCYFFRMRRQVFNAQKKA
QSSTDSGGSSGGSSGSETPGTSESATPESSGGSSGGSDKKYSIGL
AIGTNSVGWAVITDEYKVPSKKFKVLGNTDRHSIKKNLIGALLFD
SGETAEATRLKRTARRRYTRRKNRICYLQEIFSNEMAKVDDSFFH
RLEESFLVEEDKKHERHPIFGNIVDEVAYHEKYPTIYHLRKKLVD
STDKADLRLIYLALAHMIKFRGHFLIEGDLNPDNSDVDKLFIQLV
QTYNQLFEENPINASGVDAKAILSARLSKSRRLENLIAQLPGEKK
NGLFGNLIALSLGLTPNFKSNFDLAEDAKLQLSKDTYDDDLDNLL
AQIGDQYADLFLAAKNLSDAILLSDILRVNTEITKAPLSASMIKR
YDEHHQDLTLLKALVRQQLPEKYKEIFFDQSKNGYAGYIDGGASQ
EEFYKFIKPILEKMDGTEELLVKLNREDLLRKQRTFDNGSIPHQI
HLGELHAILRRQEDFYPFLKDNREKIEKILTFRIPYYVGPLARGN
SRFAWMTRKSEETITPWNFEEVVDKGASAQSFIERMTNFDKNLPN
EKVLPKHSLLYEYFTVYNELTKVKYVTEGMRKPAFLSGEQKKAIV
DLLFKTNRKVTVKQLKEDYFKKIECFDSVEISGVEDRFNASLGTY
HDLLKIIKDKDFLDNEENEDILEDIVLTLTLFEDREMIEERLKTY
AHLFDDKVMKQLKRRRYTGWGRLSRKLINGIRDKQSGKTILDFLK
SDGFANRNFMQLIHDDSLTFKEDIQKAQVSGQGDSLHEHIANLAG
SPAIKKGILQTVKVVDELVKVMGRHKPENIVIEMARENQTTQKGQ
KNSRERMKRIEEGIKELGSQILKEHPVENTQLQNEKLYLYYLQNG
RDMYVDQELDINRLSDYDVDHIVPQSFLKDDSIDNKVLTRSDKNR
GKSDNVPSEEVVKKMKNYWRQLLNAKLITQRKFDNLTKAERGGLS
ELDKAGFIKRQLVETRQITKHVAQILDSRMNTKYDENDKLIREVK
VITLKSKLVSDFRKDFQFYKVREINNYHHAHDAYLNAVVGTALIK
KYPKLESEFVYGDYKVYDVRKMIAKSEQEIGKATAKYFFYSNIMN
FFKTEITLANGEIRKRPLIETNGETGEIVWDKGRDFATVRKVLSM
PQVNTVKKTEVQTGGFSKESILPKRNSDKLIARKKDWDPKKYGGF
DSPTVAYSVLVVAKVEKGKSKKLKSVKELLGITIMERSSFEKNPI
DFLEAKGYKEVKKDLIIKLPKYSLFELENGRKRMLASAGELQKGN
ELALPSKYVNFLYLASHYEKLKGSPEDNEQKQLFVEQHKHYLDEH
IEQISEFSKRVILADANLDKVLSAYNKHRDKPIREQAENIIHLFT
LTNLGAPAAFKYFDTTIDRKRYTSTKEVLDATLIHQSITGLYETR
IDLSQLGGD
SGGSPKKKRKV
pNMG-618
ecTadA_{(wild-type)}-(SGGS)₂-XTEN-(SGGS)₂-
ecTadA_{(W23L}_H36L_P48A_R51L_L84F_A106V_D108N_
(SEQ ID NO: 191)
_{H123Y}_A142A_S146C_D147Y R152P E155V
_{I156F K157N)}-(SGGS)₂-XTEN-(SGGS)₂ nCas9_GGS_NLS
MSEVEFSHEYWMRHALTLAKRAWDEREVPVGAVLVHNNRVIGEGW
NRPIGRHDPTAHAEIMALRQGGLVMQNYRLIDATLYVTLEPCVMC
AGAMIHSRIGRVVFGARDAKTGAAGSLMDVLHHPGMNHRVEITEG
ILADECAALLSDFFRMRRQEIKAQKKAQSSTDSGGSSGGSSGSET
PGTSESATPESSGGSSGGSSEVEFSHEYWMRHALTLAKRALDERE
VPVGAVLVLNNRVIGEGWNRAIGLHDPTAHAEIMALRQGGLVMQN
YRLIDATLYVTFEPCVMCAGAMIHSRIGRVVFGVRNAKTGAAGSL
MDVLHYPGMNHRVEITEGILADECNALLCYFFRMPRQVFNAQKKA
QSSTDSGGSSGGSSGSETPGTSESATPESSGGSSGGSDKKYSIGL
AIGTNSVGWAVITDEYKVPSKKFKVLGNTDRHSIKKNLIGALLFD
SGETAEATRLKRTARRRYTRRKNRICYLQEIFSNEMAKVDDSFFH
RLEESFLVEEDKKHERHPIFGNIVDEVAYHEKYPTIYHLRKKLVD
STDKADLRLIYLALAHMIKFRGHFLIEGDLNPDNSDVDKLFIQLV
QTYNQLFEENPINASGVDAKAILSARLSKSRRLENLIAQLPGEKK
NGLFGNLIALSLGLTPNFKSNFDLAEDAKLQLSKDTYDDDLDNLL
AQIGDQYADLFLAAKNLSDAILLSDILRVNTEITKAPLSASMIKR
YDEHHQDLTLLKALVRQQLPEKYKEIFFDQSKNGYAGYIDGGASQ
EEFYKFIKPILEKMDGTEELLVKLNREDLLRKQRTFDNGSIPHQI
HLGELHAILRRQEDFYPFLKDNREKIEKILTFRIPYYVGPLARGN
SRFAWMTRKSEETITPWNFEEVVDKGASAQSFIERMTNFDKNLPN
EKVLPKHSLLYEYFTVYNELTKVKYVTEGMRKPAFLSGEQKKAIV
DLLFKTNRKVTVKQLKEDYFKKIECFDSVEISGVEDRFNASLGTY
HDLLKIIKDKDFLDNEENEDILEDIVLTLTLFEDREMIEERLKTY
AHLFDDKVMKQLKRRRYTGWGRLSRKLINGIRDKQSGKTILDFLK
SDGFANRNFMQLIHDDSLTFKEDIQKAQVSGQGDSLHEHIANLAG
SPAIKKGILQTVKVVDELVKVMGRHKPENIVIEMARENQTTQKGQ
KNSRERMKRIEEGIKELGSQILKEHPVENTQLQNEKLYLYYLQNG
RDMYVDQELDINRLSDYDVDHIVPQSFLKDDSIDNKVLTRSDKNR
GKSDNVPSEEVVKKMKNYWRQLLNAKLITQRKFDNLTKAERGGLS
ELDKAGFIKRQLVETRQITKHVAQILDSRMNTKYDENDKLIREVK
VITLKSKLVSDFRKDFQFYKVREINNYHHAHDAYLNAVVGTALIK
KYPKLESEFVYGDYKVYDVRKMIAKSEQEIGKATAKYFFYSNIMN
FFKTEITLANGEIRKRPLIETNGETGEIVWDKGRDFATVRKVLSM
PQVNIVKKTEVQTGGFSKESILPKRNSDKLIARKKDWDKKYGGF
DSPTVAYSVLVVAKVEKGKSKKLKSVKELLGITIMERSSFEKNPI
DFLEAKGYKEVKKDLIIKLPKYSLFELENGRKRMLASAGELQKGN
ELALPSKYVNFLYLASHYEKLKGSPEDNEQKQLFVEQHKHYLDEH
IEQISEFSKRVILADANLDKVLSAYNKHRDKPIREQAENIIHLFT
LTNLGAPAAFKYFDTTIDRKRYTSTKEVLDATLIHQSITGLYETR
IDLSQLGGD
SGGSPKKKRKV
pNMG-620
ecTadA _{(wild-type)}-(SGGS)₂-XTEN-(SGGS)₂-
ecTadA_{(W23R}_H36L_P48A_R51L_L84F_
_{A106V}_D108N_
_{H123Y}_S146C_D147Y_R152P_E155V_I156F K157N)-
(SGGS)-XTEN-(SGGS)₂_nCas9GGS_NLS
(SEQ ID NO: 192)
MSEVEFSHEYWMRHALTLAKRAWDEREVPVGAVLVHNNRVIGEGW
NRPIGRHDPTAHAEIMALRQGGLVMQNYRLIDATLYVTLEPCVMC
AGAMIHSRIGRVVFGARDAKTGAAGSLMDVLHHPGMNHRVEITEG
ILADECAALLSDFFRMRRQEIKAQKKAQSSTDSGGSSGGSSGSET
PGTSESATPESSGGSSGGSSEVEFSHEYWMRHALTLAKRARDERE
VPVGAVLVLNNRVIGEGWNRAIGLHDPTAHAEIMALRQGGLVMQN
YRLIDATLYVTFEPCVMCAGAMIHSRIGRVVFGVRNAKTGAAGSL
MDVLHYPGMNHRVEITEGILADECAALLCYFFRMPRQVFNAQKKA
QSSTDSGGSSGGSSGSETPGTSESATPESSGGSSGGSDKKYSIGL
AIGTNSVGWAVITDEYKVPSKKFKVLGNTDRHSIKKNLIGALLFD
SGETAEATRLKRTARRRYTRRKNRICYLQEIFSNEMAKVDDSFFH
RLEESFLVEEDKKHERHPIFGNIVDEVAYHEKYPTIYHLRKKLVD
STDKADLRLIYLALAHMIKFRGHFLIEGDLNPDNSDVDKLFIQLV
QTYNQLFEENPINASGVDAKAILSARLSKSRRLENLIAQLPGEKK
NGLFGNLIALSLGLTPNFKSNFDLAEDAKLQLSKDTYDDDLDNLL
AQIGDQYADLFLAAKNLSDAILLSDILRVNTEITKAPLSASMIKR
YDEHHQDLTLLKALVRQQLPEKYKEIFFDQSKNGYAGYIDGGASQ
EEFYKFIKPILEKMDGTEELLVKLNREDLLRKQRTFDNGSIPHQI
HLGELHAILRRQEDFYPFLKDNREKIEKILTFRIPYYVGPLARGN
SRFAWMTRKSEETITPWNFEEVVDKGASAQSFIERMTNFDKNLPN
EKVLPKHSLLYEYFTVYNELTKVKYVTEGMRKPAFLSGEQKKAIV
DLLFKTNRKVTVKQLKEDYFKKIECFDSVEISGVEDRFNASLGTY
HDLLKIIKDKDFLDNEENEDILEDIVLTLTLFEDREMIEERLKTY
AHLFDDKVMKQLKRRRYTGWGRLSRKLINGIRDKQSGKTILDFLK
SDGFANRNFMQLIHDDSLTFKEDIQKAQVSGQGDSLHEHIANLAG
SPAIKKGILQTVKVVDELVKVMGRHKPENTVIEMARENQTTQKGQ
KNSRERMKRIEEGIKELGSQILKEHPVENTQLQNEKLYLYYLQNG
RDMYVDQELDINRLSDYDVDHIVPQSFLKDDSIDNKVLTRSDKNR
GKSDNVPSEEVVKKMKNYWRQLLNAKLITQRKFDNLTKAERGGLS
ELDKAGFIKRQLVETRQITKHVAQILDSRMNTKYDENDKLIREVK
VITLKSKLVSDFRKDFQFYKVREINNYHHAHDAYLNAVVGTALIK
KYPKLESEFVYGDYKVYDVRKMIAKSEQEIGKATAKYFFYSNIMN
FFKTEITLANGEIRKRPLIETNGETGEIVWDKGRDFATVRKVLSM
PQVNIVKKTEVQTGGFSKESILPKRNSDKLIARKKDWDPKKYGGF
DSPTVAYSVLVVAKVEKGKSKKLKSVKELLGITIMERSSFEKNPI
DFLEAKGYKEVKKDLIIKLPKYSLFELENGRKRMLASAGELQKGN
ELALPSKYVNFLYLASHYEKLKGSPEDNEQKQLFVEQHKHYLDEH
IEQISEFSKRVILADANLDKVLSAYNKHRDKPIREQAENIIHLFT
LTNLGAPAAFKYFDTTIDRKRYTSTKEVLDATLIHQSITGLYETR
IDLSQLGGD
SGGSPKKKRKV
pNMG-621
ecTadA_{(wild-type)}- 32 a.a. linker-
ecTadA_{(H36L}_P48A_R51L_L84F_
_{A106V}_D108N_H123Y_
_{S146C}_D147Y_R152P_E155V_H56F_K157N)-
24 a.a. linker nCas9 GGS NLS
(SEQ ID NO:193)
MSEVEFSHEYWMRHALTLAKRAWDEREVPVGAVLVHNNRVIGEGW
NRPIGRHDPTAHAEIMALRQGGLVMQNYRLIDATLYVTLEPCVMC
AGAMIHSRIGRVVFGARDAKTGAAGSLMDVLHHPGMNHRVEITEG
ILADECAALLSDFFRMRRQEIKAQKKAQSSTDSGGSSGGSSGSET
PGTSESATPESSGGSSGGSSEVEFSHEYWMRHALTLAKRAWDERE
VPVGAVLVLNNRVIGEGWNRAIGLHDPTAHAEIMALRQGGLVMQN
YRLIDATLYVTFEPCVMCAGAMIHSRIGRVVFGVRNAKTGAAGSL
MDVLHYPGMNHRVEITEGILADECAALLCYFFRMPRQVFNAQKKA
QSSTDSGGSSGGSSGSETPGTSESATPESDKKYSIGLAIGTNSVG
WAVITDEYKVPSKKFKVLGNTDRHSIKKNLIGALLFDSGETAEAT
RLKRTARRRYTRRKNRICYLQEIFSNEMAKVDDSFFHRLEESFLV
EEDKKHERHPIFGNIVDEVAYHEKYPTIYHLRKKLVDSTDKADLR
LIYLALAHMIKFRGHFLIEGDLNPDNSDVDKLFIQLVQTYNQLFE
ENPINASGVDAKAILSARLSKSRRLENLIAQLPGEKKNGLFGNLI
ALSLGLTPNFKSNFDLAEDAKLQLSKDTYDDDLDNLLAQIGDQYA
DLFLAAKNLSDAILLSDILRVNTEITKAPLSASMIKRYDEHHQDL
TLLKALVRQQLPEKYKEIFFDQSKNGYAGYIDGGASQEEFYKFIK
PILEKMDGTEELLVKLNREDLLRKQRTFDNGSIPHQIHLGELHAI
LRRQEDFYPFLKDNREKIEKILTFRIPYYVGPLARGNSRFAWMTR
KSEETITPWNFEEVVDKGASAQSFIERMTNFDKNLPNEKVLPKHS
LLYEYFTVYNELTKVKYVTEGMRKPAFLSGEQKKAIVDLLFKTNR
KVTVKQLKEDYFKKIECFDSVEISGVEDRFNASLGTYHDLLKIIK
DKDFLDNEENEDILEDIVLTLTLFEDREMIEERLKTYAHLFDDKV
MKQLKRRRYTGWGRLSRKLINGIRDKQSGKTILDFLKSDGFANRN
FMQLIHDDSLTFKEDIQKAQVSGQGDSLHEHIANLAGSPAIKKGI
LQTVKVVDELVKVMGRHKPENIVIEMARENQTTQKGQKNSRERMK
RIEEGIKELGSQILKEHPVENTQLQNEKLYLYYLQNGRDMYVDQE
LDINRLSDYDVDHIVPQSFLKDDSIDNKVLTRSDKNRGKSDNVPS
EEVVKKMKNYWRQLLNAKLITQRKFDNLTKAERGGLSELDKAGFI
KRQLVETRQITKHVAQILDSRMNTKYDENDKLIREVKVITLKSKL
VSDFRKDFQFYKVREINNYHHAHDAYLNAVVGTALIKKYPKLESE
FVYGDYKVYDVRKMIAKSEQEIGKATAKYFFYSNIMNFFKTEITL
ANGEIRKRPLIETNGETGEIVWDKGRDFATVRKVLSMPQVNIVKK
TEVQTGGFSKESILPKRNSDKLIARKKDWDPKKYGGFDSPTVAYS
VLVVAKVEKGKSKKLKSVKELLGITIMERSSFEKNPIDFLEAKGY
KEVKKDLIIKLPKYSLFELENGRKRMLASAGELQKGNELALPSKY
VNFLYLASHYEKLKGSPEDNEQKQLFVEQHKHYLDEIIEQISEFS
KRVILADANLDKVLSAYNKHRDKPIREQAENIIHLFTLTNLGAPA
AFKYFDTTIDRKRYTSTKEVLDATLIHQSITGLYETRIDLSQLGG
DSGGSPKKKRKV
pNMG-622
ecTadA_{(wild-type)}- 32 a.a. linker-
ecTadA_{(H36L}_P48A_R51L_L84F_A106V_
_{D108N}_H123Y_A142N_
_{S146C}_D147Y_R152P_E155V_H56F_K157N)-
24 a.a. linker nCas9_GGS_NLS
(SEQ ID NO: 194)
MSEVEFSHEYWMRHALTLAKRAWDEREVPVGAVLVHNNRVIGEGW
NRPIGRHDPTAHAEIMALRQGGLVMQNYRLIDATLYVTLEPCVMC
AGAMIHSRIGRVVFGARDAKTGAAGSLMDVLHHPGMNHRVEITEG
ILADECAALLSDFFRMRRQEIKAQKKAQSSTDSGGSSGGSSGSET
PGTSESATPESSGGSSGGSSEVEFSHEYWMRHALTLAKRAWDERE
VPVGAVLVLNNRVIGEGWNRAIGLHDPTAHAEIMALRQGGLVMQN
YRLIDATLYVTFEPCVMCAGAMIHSRIGRVVFGVRNAKTGAAGSL
MDVLHYPGMNHRVEITEGILADECNALLCYFFRMPRQVFNAQKKA
QSSTDSGGSSGGSSGSETPGTSESATPESDKKYSIGLAIGTNSVG
WAVITDEYKVPSKKFKVLGNTDRHSIKKNLIGALLFDSGETAEAT
RLKRTARRRYTRRKNRICYLQEIFSNEMAKVDDSFFHRLEESFLV
EEDKKHERHPIFGNIVDEVAYHEKYPTIYHLRKKLVDSTDKADLR
LIYLALAHMIKFRGHFLIEGDLNPDNSDVDKLFIQLVQTYNQLFE
ENPINASGVDAKAILSARLSKSRRLENLIAQLPGEKKNGLFGNLI
ALSLGLTPNFKSNFDLAEDAKLQLSKDTYDDDLDNLLAQIGDQYA
DLFLAAKNLSDAILLSDILRVNTEITKAPLSASMIKRYDEHHQDL
TLLKALVRQQLPEKYKEIFFDQSKNGYAGYIDGGASQEEFYKFIK
PILEKMDGTEELLVKLNREDLLRKQRTFDNGSIPHQIHLGELHAI
LRRQEDFYPFLKDNREKIEKILTFRIPYYVGPLARGNSRFAWMTR
KSEETITPWNFEEVVDKGASAQSFIERMTNFDKNLPNEKVLPKHS
LLYEYFTVYNELTKVKYVTEGMRKPAFLSGEQKKAIVDLLFKTNR
KVTVKQLKEDYFKKIECFDSVEISGVEDRFNASLGTYHDLLKIIK
DKDFLDNEENEDILEDIVLTLTLFEDREMIEERLKTYAHLFDDKV
MKQLKRRRYTGWGRLSRKLINGIRDKQSGKTILDFLKSDGFANRN
FMQLIHDDSLTFKEDIQKAQVSGQGDSLHEHIANLAGSPAIKKGI
LQTVKVVDELVKVMGRHKPENIVIEMARENQTTQKGQKNSRERMK
RIEEGIKELGSQILKEHPVENTQLQNEKLYLYYLQNGRDMYVDQE
LDINRLSDYDVDHIVPQSFLKDDSIDNKVLTRSDKNRGKSDNVPS
EEVVKKMKNYWRQLLNAKLITQRKFDNLTKAERGGLSELDKAGFI
KRQLVETRQITKHVAQILDSRMNTKYDENDKLIREVKVITLKSKL
VSDFRKDFQFYKVREINNYHHAHDAYLNAVVGTALIKKYPKLESE
FVYGDYKVYDVRKMIAKSEQEIGKATAKYFFYSNIMNFFKTEITL
ANGEIRKRPLIETNGETGEIVWDKGRDFATVRKVLSMPQVNIVKK
TEVQTGGFSKESILPKRNSDKLIARKKDWDPKKYGGFDSPTVAYS
VLVVAKVEKGKSKKLKSVKELLGITIMERSSFEKNPIDFLEAKGY
KEVKKDLIIKLPKYSLFELENGRKRMLASAGELQKGNELALPSKY
VNFLYLASHYEKLKGSPEDNEQKQLFVEQHKHYLDEIIEQISEFS
KRVILADANLDKVLSAYNKHRDKPIREQAENIIHLFTLTNLGAPA
AFKYFDTTIDRKRYTSTKEVLDATLIHQSITGLYETRIDLSQLGG
DSGGSPKKKRKV
pNMG-623
ecTadA_{(wild-type)}-32 a.a. linker-
ecTadA_{(W23L}_H36L_P48A_R51L_L84F_A106V_
_{D108N}_H123Y_S146C_
_{D147Y}_R152PE155V_1156F_K157N)-
24 a.a. linker nCas9 GGS _NLS
(SEQ ID NO: 195)
MSEVEFSHEYWMRHALTLAKRAWDEREVPVGAVLVHNNRVIGEGW
NRPIGRHDPTAHAEIMALRQGGLVMQNYRLIDATLYVTLEPCVMC
AGAMIHSRIGRVVFGARDAKTGAAGSLMDVLHHPGMNHRVEITEG
ILADECAALLSDFFRMRRQEIKAQKKAQSSTDSGGSSGGSSGSET
PGTSESATPESSGGSSGGSSEVEFSHEYWMRHALTLAKRALDERE
VPVGAVLVLNNRVIGEGWNRAIGLHDPTAHAEIMALRQGGLVMQN
YRLIDATLYVTFEPCVMCAGAMIHSRIGRVVFGVRNAKTGAAGSL
MDVLHYPGMNHRVEITEGILADECAALLCYFFRMPRQVFNAQKKA
QSSTDSGGSSGGSSGSETPGTSESATPESDKKYSIGLAIGTNSVG
WAVITDEYKVPSKKFKVLGNTDRHSIKKNLIGALLFDSGETAEAT
RLKRTARRRYTRRKNRICYLQEIFSNEMAKVDDSFFHRLEESFLV
EEDKKHERHPIFGNIVDEVAYHEKYPTIYHLRKKLVDSTDKADLR
LIYLALAHMIKFRGHFLIEGDLNPDNSDVDKLFIQLVQTYNQLFE
ENPINASGVDAKAILSARLSKSRRLENLIAQLPGEKKNGLFGNLI
ALSLGLTPNFKSNFDLAEDAKLQLSKDTYDDDLDNLLAQIGDQYA
DLFLAAKNLSDAILLSDILRVNTEITKAPLSASMIKRYDEHHQDL
TLLKALVRQQLPEKYKEIFFDQSKNGYAGYIDGGASQEEFYKFIK
PILEKMDGTEELLVKLNREDLLRKQRTFDNGSIPHQIHLGELHAI
LRRQEDFYPFLKDNREKIEKILTFRIPYYVGPLARGNSRFAWMTR
KSEETITPWNFEEVVDKGASAQSFIERMTNFDKNLPNEKVLPKHS
LLYEYFTVYNELTKVKYVTEGMRKPAFLSGEQKKAIVDLLFKTNR
KVTVKQLKEDYFKKIECFDSVEISGVEDRFNASLGTYHDLLKIIK
DKDFLDNEENEDILEDIVLTLTLFEDREMIEERLKTYAHLFDDKV
MKQLKRRRYTGWGRLSRKLINGIRDKQSGKTILDFLKSDGFANRN
FMQLIHDDSLTFKEDIQKAQVSGQGDSLHEHIANLAGSPAIKKGI
LQTVKVVDELVKVMGRHKPENIVIEMARENQTTQKGQKNSRERMK
RIEEGIKELGSQILKEHPVENTQLQNEKLYLYYLQNGRDMYVDQE
LDINRLSDYDVDHIVPQSFLKDDSIDNKVLTRSDKNRGKSDNVPS
EEVVKKMKNYWRQLLNAKLITQRKFDNLTKAERGGLSELDKAGFI
KRQLVETRQITKHVAQILDSRMNTKYDENDKLIREVKVITLKSKL
VSDFRKDFQFYKVREINNYHHAHDAYLNAVVGTALIKKYPKLESE
FVYGDYKVYDVRKMIAKSEQEIGKATAKYFFYSNIMNFFKTEITL
ANGEIRKRPLIETNGETGEIVWDKGRDFATVRKVLSMPQVNIVKK
TEVQTGGFSKESILPKRNSDKLIARKKDWDPKKYGGFDSPTVAYS
VLVVAKVEKGKSKKLKSVKELLGITIMERSSFEKNPIDFLEAKGY
KEVKKDLIIKLPKYSLFELENGRKRMLASAGELQKGNELALPSKY
VNFLYLASHYEKLKGSPEDNEQKQLFVEQHKHYLDEIIEQISEFS
KRVILADANLDKVLSAYNKHRDKPIREQAENIIHLFTLTNLGAPA
AFKYFDTTIDRKRYTSTKEVLDATLIHQSITGLYETRIDLSQLGG
DSGGSPKKKRKV
ABE6.3
ecTadA_{(wild-type)}-(SGGS)₂-XTEN-(SGGS)₂-
ecTadA_{(H36L}_P48S_R51L_L84F_A106V_
_{D108N}_H123Y_S146C_D147Y_E155V_I156F_K157N)-
(SGGS)₂-XTEN-(SGGS)₂_nCas9_SGGS_NLS
(SEQ ID NO: 196)
MSEVEFSHEYWMRHALTLAKRAWDEREVPVGAVLVHNNRVIGEGW
NRPIGRHDPTAHAEIMALRQGGLVMQNYRLIDATLYVTLEPCVMC
AGAMIHSRIGRVVFGARDAKTGAAGSLMDVLHHPGMNHRVEITEG
ILADECAALLSDFFRMRRQEIKAQKKAQSSTDSGGSSGGSSGSET
PGTSESATPESSGGSSGGSSEVEFSHEYWMRHALTLAKRAWDERE
VPVGAVLVLNNRVIGEGWNRSIGLHDPTAHAEIMALRQGGLVMQN
YRLIDATLYVTFEPCVMCAGAMIHSRIGRVVFGVRNAKTGAAGSL
MDVLHYPGMNHRVEITEGILADECAALLCYFFRMRRQVFNAQKKA
QSSTDSGGSSGGSSGSETPGTSESATPESSGGSSGGSDKKYSIGL
AIGTNSVGWAVITDEYKVPSKKFKVLGNTDRHSIKKNLIGALLFD
SGETAEATRLKRTARRRYTRRKNRICYLQEIFSNEMAKVDDSFFH
RLEESFLVEEDKKHERHPIFGNIVDEVAYHEKYPTIYHLRKKLVD
STDKADLRLIYLALAHMIKFRGHFLIEGDLNPDNSDVDKLFIQLV
QTYNQLFEENPINASGVDAKAILSARLSKSRRLENLIAQLPGEKK
NGLFGNLIALSLGLTPNFKSNFDLAEDAKLQLSKDTYDDDLDNLL
AQIGDQYADLFLAAKNLSDAILLSDILRVNTEITKAPLSASMIKR
YDEHHQDLTLLKALVRQQLPEKYKEIFFDQSKNGYAGYIDGGASQ
EEFYKFIKPILEKMDGTEELLVKLNREDLLRKQRTFDNGSIPHQI
HLGELHAILRRQEDFYPFLKDNREKIEKILTFRIPYYVGPLARGN
SRFAWMTRKSEETITPWNFEEVVDKGASAQSFIERMTNFDKNLPN
EKVLPKHSLLYEYFTVYNELTKVKYVTEGMRKPAFLSGEQKKAIV
DLLFKTNRKVTVKQLKEDYFKKIECFDSVEISGVEDRFNASLGTY
HDLLKIIKDKDFLDNEENEDILEDIVLTLTLFEDREMIEERLKTY
AHLFDDKVMKQLKRRRYTGWGRLSRKLINGIRDKQSGKTILDFLK
SDGFANRNFMQLIHDDSLTFKEDIQKAQVSGQGDSLHEHIANLAG
SPAIKKGILQTVKVVDELVKVMGRHKPENIVIEMARENQTTQKGQ
KNSRERMKRIEEGIKELGSQILKEHPVENTQLQNEKLYLYYLQNG
RDMYVDQELDINRLSDYDVDHIVPQSFLKDDSIDNKVLTRSDKNR
GKSDNVPSEEVVKKMKNYWRQLLNAKLITQRKFDNLTKAERGGLS
ELDKAGFIKRQLVETRQITKHVAQILDSRMNTKYDENDKLIREVK
VITLKSKLVSDFRKDFQFYKVREINNYHHAHDAYLNAVVGTALIK
KYPKLESEFVYGDYKVYDVRKMIAKSEQEIGKATAKYFFYSNIMN
FFKTEITLANGEIRKRPLIETNGETGEIVWDKGRDFATVRKVLSM
PQVNIVKKTEVQTGGFSKESILPKRNSDKLIARKKDWDPKKYGGF
DSPTVAYSVLVVAKVEKGKSKKLKSVKELLGITIMERSSFEKNPI
DFLEAKGYKEVKKDLIIKLPKYSLFELENGRKRMLASAGELQKGN
ELALPSKYVNFLYLASHYEKLKGSPEDNEQKQLFVEQHKHYLDEH
IEQISEFSKRVILADANLDKVLSAYNKHRDKPIREQAENIIHLFT
LTNLGAPAAFKYFDTTIDRKRYTSTKEVLDATLIHQSITGLYETR
IDLSQLGGD
SGGSPKKKRKV
ABE6.4
ecTadA_{(wild-type)}-(SGGS)₂-XTEN-(SGGS)₂-
ecTadA_{(H36L}_P48S_R51L_L84F_A106V_
_{D108N}_H123Y_A142N_S146C_D147Y_E155V_
_{I156F}_K157N)⁻(SGGS)₂-XTEN-(SGGS)₂_
nCas9_SGGS_NLS
(SEQ ID NO: 197)
MSEVEFSHEYWMRHALTLAKRAWDEREVPVGAVLVHNNRVIGEGW
NRPIGRHDPTAHAEIMALRQGGLVMQNYRLIDATLYVTLEPCVMC
AGAMIHSRIGRVVFGARDAKTGAAGSLMDVLHHPGMNHRVEITEG
ILADECAALLSDFFRMRRQEIKAQKKAQSSTDSGGSSGGSSGSET
PGTSESATPESSGGSSGGSSEVEFSHEYWMRHALTLAKRAWDERE
VPVGAVLVLNNRVIGEGWNRSIGLHDPTAHAEIMALRQGGLVMQN
YRLIDATLYVTFEPCVMCAGAMIHSRIGRVVFGVRNAKTGAAGSL
MDVLHYPGMNHRVEITEGILADECNALLCYFFRMRRQVFNAQKKA
QSSTDSGGSSGGSSGSETPGTSESATPESSGGSSGGSDKKYSIGL
AIGTNSVGWAVITDEYKVPSKKFKVLGNTDRHSIKKNLIGALLFD
SGETAEATRLKRTARRRYTRRKNRICYLQEIFSNEMAKVDDSFFH
RLEESFLVEEDKKHERHPIFGNIVDEVAYHEKYPTIYHLRKKLVD
STDKADLRLIYLALAHMIKFRGHFLIEGDLNPDNSDVDKLFIQLV
QTYNQLFEENPINASGVDAKAILSARLSKSRRLENLIAQLPGEKK
NGLFGNLIALSLGLTPNFKSNFDLAEDAKLQLSKDTYDDDLDNLL
AQIGDQYADLFLAAKNLSDAILLSDILRVNTEITKAPLSASMIKR
YDEHHQDLTLLKALVRQQLPEKYKEIFFDQSKNGYAGYIDGGASQ
EEFYKFIKPILEKMDGTEELLVKLNREDLLRKQRTFDNGSIPHQI
HLGELHAILRRQEDFYPFLKDNREKIEKILTFRIPYYVGPLARGN
SRFAWMTRKSEETITPWNFEEVVDKGASAQSFIERMTNFDKNLPN
EKVLPKHSLLYEYFTVYNELTKVKYVTEGMRKPAFLSGEQKKAIV
DLLFKTNRKVTVKQLKEDYFKKIECFDSVEISGVEDRFNASLGTY
HDLLKIIKDKDFLDNEENEDILEDIVLTLTLFEDREMIEERLKTY
AHLFDDKVMKQLKRRRYTGWGRLSRKLINGIRDKQSGKTILDFLK
SDGFANRNFMQLIHDDSLTFKEDIQKAQVSGQGDSLHEHIANLAG
SPAIKKGILQTVKVVDELVKVMGRHKPENIVIEMARENQTTQKGQ
KNSRERMKRIEEGIKELGSQILKEHPVENTQLQNEKLYLYYLQNG
RDMYVDQELDINRLSDYDVDHIVPQSFLKDDSIDNKVLTRSDKNR
GKSDNVPSEEVVKKMKNYWRQLLNAKLITQRKFDNLTKAERGGLS
ELDKAGFIKRQLVETRQITKHVAQILDSRMNTKYDENDKLIREVK
VITLKSKLVSDFRKDFQFYKVREINNYHHAHDAYLNAVVGTALIK
KYPKLESEFVYGDYKVYDVRKMIAKSEQEIGKATAKYFFYSNIMN
FFKTEITLANGEIRKRPLIETNGETGEIVWDKGRDFATVRKVLSM
PQVNIVKKTEVQTGGFSKESILPKRNSDKLIARKKDWDPKKYGGF
DSPTVAYSVLVVAKVEKGKSKKLKSVKELLGITIMERSSFEKNPI
DFLEAKGYKEVKKDLIIKLPKYSLFELENGRKRMLASAGELQKGN
ELALPSKYVNFLYLASHYEKLKGSPEDNEQKQLFVEQHKHYLDEH
IEQISEFSKRVILADANLDKVLSAYNKHRDKPIREQAENIIHLFT
LTNLGAPAAFKYFDTTIDRKRYTSTKEVLDATLIHQSITGLYETR
IDLSQLGGDSGGSPKKKRKV
ABE7.8
ecTadA_{(wild-type)}-(SGGS)₂-XTEN-(SGGS)₂-
ecTadA_{(W23L}_H36L_P48A_R51L_L84F_A106V_D108N_
_{H123Y}_A142N_S146C_D147Y_E155V_I156F_K157N)-
(SGGS)-XTEN-(SGGS)₂_nCas9_SGGS_NLS
(SEQ ID NO: 198)
MSEVEFSHEYWMRHALTLAKRAWDEREVPVGAVLVHNNRVIGEGW
NRPIGRHDPTAHAEIMALRQGGLVMQNYRLIDATLYVTLEPCVMC
AGAMIHSRIGRVVFGARDAKTGAAGSLMDVLHHPGMNHRVEITEG
ILADECAALLSDFFRMRRQEIKAQKKAQSSTDSGGSSGGSSGSET
PGTSESATPESSGGSSGGSSEVEFSHEYWMRHALTLAKRALDERE
VPVGAVLVLNNRVIGEGWNRAIGLHDPTAHAEIMALRQGGLVMQN
YRLIDATLYVTFEPCVMCAGAMIHSRIGRVVFGVRNAKTGAAGSL
MDVLHYPGMNHRVEITEGILADECNALLCYFFRMRRQVFNAQKKA
QSSTDSGGSSGGSSGSETPGTSESATPESSGGSSGGSDKKYSIGL
AIGTNSVGWAVITDEYKVPSKKFKVLGNTDRHSIKKNLIGALLFD
SGETAEATRLKRTARRRYTRRKNRICYLQEIFSNEMAKVDDSFFH
RLEESFLVEEDKKHERHPIFGNIVDEVAYHEKYPTIYHLRKKLVD
STDKADLRLIYLALAHMIKFRGHFLIEGDLNPDNSDVDKLFIQLV
QTYNQLFEENPINASGVDAKAILSARLSKSRRLENLIAQLPGEKK
NGLFGNLIALSLGLTPNFKSNFDLAEDAKLQLSKDTYDDDLDNLL
AQIGDQYADLFLAAKNLSDAILLSDILRVNTEITKAPLSASMIKR
YDEHHQDLTLLKALVRQQLPEKYKEIFFDQSKNGYAGYIDGGASQ
EEFYKFIKPILEKMDGTEELLVKLNREDLLRKQRTFDNGSIPHQI
HLGELHAILRRQEDFYPFLKDNREKIEKILTFRIPYYVGPLARGN
SRFAWMTRKSEETITPWNFEEVVDKGASAQSFIERMTNFDKNLPN
EKVLPKHSLLYEYFTVYNELTKVKYVTEGMRKPAFLSGEQKKAIV
DLLFKTNRKVTVKQLKEDYFKKIECFDSVEISGVEDRFNASLGTY
HDLLKIIKDKDFLDNEENEDILEDIVLTLTLFEDREMIEERLKTY
AHLFDDKVMKQLKRRRYTGWGRLSRKLINGIRDKQSGKTILDFLK
SDGFANRNFMQLIHDDSLTFKEDIQKAQVSGQGDSLHEHIANLAG
SPAIKKGILQTVKVVDELVKVMGRHKPENIVIEMARENQTTQKGQ
KNSRERMKRIEEGIKELGSQILKEHPVENTQLQNEKLYLYYLQNG
RDMYVDQELDINRLSDYDVDHIVPQSFLKDDSIDNKVLTRSDKNR
GKSDNVPSEEVVKKMKNYWRQLLNAKLITQRKFDNLTKAERGGLS
ELDKAGFIKRQLVETRQITKHVAQILDSRMNTKYDENDKLIREVK
VITLKSKLVSDFRKDFQFYKVREINNYHHAHDAYLNAVVGTALIK
KYPKLESEFVYGDYKVYDVRKMIAKSEQEIGKATAKYFFYSNIMN
FFKTEITLANGEIRKRPLIETNGETGEIVWDKGRDFATVRKVLSM
PQVNIVKKTEVQTGGFSKESILPKRNSDKLIARKKDWDPKKYGGF
DSPTVAYSVLVVAKVEKGKSKKLKSVKELLGITIMERSSFEKNPI
DFLEAKGYKEVKKDLIIKLPKYSLFELENGRKRMLASAGELQKGN
ELALPSKYVNFLYLASHYEKLKGSPEDNEQKQLFVEQHKHYLDEI
IEQISEFSKRVILADANLDKVLSAYNKHRDKPIREQAENIIHLFT
LTNLGAPAAFKYFDTTIDRKRYTSTKEVLDATLIHQSITGLYETR
IDLSQLGGDSGGSPKKKRKVc
ABE7.9
ecTadA_{(wild-type)}-(SGGS)₂-XTEN-(SGGS)₂-
ecTadA_{(W23L}_H36L_P48A_R51L_L84F_A106V_
_{D108N}_H123Y_A142N_S146C_D147Y_R152P_
_{E155V}_1156F_K157N)-(SGGS)₂-XTEN-
(SGGS)₂_nCas9_SGGS_NLS
(SEQ ID NO: 199)
MSEVEFSHEYWMRHALTLAKRAWDEREVPVGAVLVHNNRVIGEGW
NRPIGRHDPTAHAEIMALRQGGLVMQNYRLIDATLYVTLEPCVMC
AGAMIHSRIGRVVFGARDAKTGAAGSLMDVLHHPGMNHRVEITEG
ILADECAALLSDFFRMRRQEIKAQKKAQSSTDSGGSSGGSSGSET
PGTSESATPESSGGSSGGSSEVEFSHEYWMRHALTLAKRALDERE
VPVGAVLVLNNRGEGWNRAIGLHDPTAHAEIMALRQGGLVMQNYR
LIDATLYVTFEPCVMCAGAMIHSRIGRVVFGVRNAKTGAAGSLMD
VLHYPGMNHRVEITEGILADECNALLCYFFRMPRQVFNAQKKAQS
STDSGGSSGGSSGSETPGTSESATPESSGGSSGGSDKKYSIGLAI
GTNSVGWAVITDEYKVPSKKFKVLGNTDRHSIKKNLIGALLFDSG
ETAEATRLKRTARRRYTRRKNRICYLQEIFSNEMAKVDDSFFHRL
EESFLVEEDKKHERHPIFGNIVDEVAYHEKYPTIYHLRKKLVDST
DKADLRLIYLALAHMIKFRGHFLIEGDLNPDNSDVDKLFIQLVQT
YNQLFEENPINASGVDAKAILSARLSKSRRLENLIAQLPGEKKNG
LFGNLIALSLGLTPNFKSNFDLAEDAKLQLSKDTYDDDLDNLLAQ
IGDQYADLFLAAKNLSDAILLSDILRVNTEITKAPLSASMIKRYD
EHHQDLTLLKALVRQQLPEKYKEIFFDQSKNGYAGYIDGGASQEE
FYKFIKPILEKMDGTEELLVKLNREDLLRKQRTFDNGSIPHQIHL
GELHAILRRQEDFYPFLKDNREKIEKILTFRIPYYVGPLARGNSR
FAWMTRKSEETITPWNFEEVVDKGASAQSFIERMTNFDKNLPNEK
VLPKHSLLYEYFTVYNELTKVKYVTEGMRKPAFLSGEQKKAIVDL
LFKTNRKVTVKQLKEDYFKKIECFDSVEISGVEDRFNASLGTYHD
LLKIIKDKDFLDNEENEDILEDIVLTLTLFEDREMIEERLKTYAH
LFDDKVMKQLKRRRYTGWGRLSRKLINGIRDKQSGKTILDFLKSD
GFANRNFMQLIHDDSLTFKEDIQKAQVSGQGDSLHEHIANLAGSP
AIKKGILQTVKVVDELVKVMGRHKPENIVIEMARENQTTQKGQKN
SRERMKRIEEGIKELGSQILKEHPVENTQLQNEKLYLYYLQNGRD
MYVDQELDINRLSDYDVDHIVPQSFLKDDSIDNKVLTRSDKNRGK
SDNVPSEEVVKKMKNYWRQLLNAKLITQRKFDNLTKAERGGLSEL
DKAGFIKRQLVETRQITKHVAQILDSRMNTKYDENDKLIREVKVI
TLKSKLVSDFRKDFQFYKVREINNYHHAHDAYLNAVVGTALIKKY
PKLESEFVYGDYKVYDVRKMIAKSEQEIGKATAKYFFYSNIMNFF
KTEITLANGEIRKRPLIETNGETGEIVWDKGRDFATVRKVLSMPQ
VNIVKKTEVQTGGFSKESILPKRNSDKLIARKKDWDPKKYGGFDS
PTVAYSVLVVAKVEKGKSKKLKSVKELLGITIMERSSFEKNPIDF
LEAKGYKEVKKDLIIKLPKYSLFELENGRKRMLASAGELQKGNEL
ALPSKYVNFLYLASHYEKLKGSPEDNEQKQLFVEQHKHYLDEIIE
QISEFSKRVILADANLDKVLSAYNKHRDKPIREQAENIIHLFTLT
NLGAPAAFKYFDTTIDRKRYTSTKEVLDATLIHQSITGLYETRID
LSQLGGDSGGSPKKKRKV
ABE7.10
ecTadA_{(wild-type)}-(SGGS)₂-XTEN-(SGGS)₂-
ecTadA_{(W23R}_H36L_P48A_R51L_L84F_A106V_
_{D108N}_H123Y_S146C_D147Y_R152P_E155V_
_{I156F}_K157N)-(SGGS)₂-XTEN-(SGGS)₂_
nCas9_SGGS_NLS
(SEQ ID NO: 200)
MSEVEFSHEYWMRHALTLAKRAWDEREVPVGAVLVHNNRVIGEGW
NRPIGRHDPTAHAEIMALRQGGLVMQNYRLIDATLYVTLEPCVMC
AGAMIHSRIGRVVFGARDAKTGAAGSLMDVLHHPGMNHRVEITEG
ILADECAALLSDFFRMRRQEIKAQKKAQSSTDSGGSSGGSSGSET
PGTSESATPESSGGSSGGSSEVEFSHEYWMRHALTLAKRARDERE
VPVGAVLVLNNRVIGEGWNRAIGLHDPTAHAEIMALRQGGLVMQN
YRLIDATLYVTFEPCVMCAGAMIHSRIGRVVFGVRNAKTGAAGSL
MDVLHYPGMNHRVEITEGILADECAALLCYFFRMPRQVFNAQKKA
QSSTDSGGSSGGSSGSETPGTSESATPESSGGSSGGSDKKYSIGL
AIGTNSVGWAVITDEYKVPSKKFKVLGNTDRHSIKKNLIGALLFD
SGETAEATRLKRTARRRYTRRKNRICYLQEIFSNEMAKVDDSFFH
RLEESFLVEEDKKHERHPIFGNIVDEVAYHEKYPTIYHLRKKLVD
STDKADLRLIYLALAHMIKFRGHFLIEGDLNPDNSDVDKLFIQLV
QTYNQLFEENPINASGVDAKAILSARLSKSRRLENLIAQLPGEKK
NGLFGNLIALSLGLTPNFKSNFDLAEDAKLQLSKDTYDDDLDNLL
AQIGDQYADLFLAAKNLSDAILLSDILRVNTEITKAPLSASMIKR
YDEHHQDLTLLKALVRQQLPEKYKEIFFDQSKNGYAGYIDGGASQ
EEFYKFIKPILEKMDGTEELLVKLNREDLLRKQRTFDNGSIPHQI
HLGELHAILRRQEDFYPFLKDNREKIEKILTFRIPYYVGPLARGN
SRFAWMTRKSEETITPWNFEEVVDKGASAQSFIERMTNFDKNLPN
EKVLPKHSLLYEYFTVYNELTKVKYVTEGMRKPAFLSGEQKKAIV
DLLFKTNRKVTVKQLKEDYFKKIECFDSVEISGVEDRFNASLGTY
HDLLKIIKDKDFLDNEENEDILEDIVLTLTLFEDREMIEERLKTY
AHLFDDKVMKQLKRRRYTGWGRLSRKLINGIRDKQSGKTILDFLK
SDGFANRNFMQLIHDDSLTFKEDIQKAQVSGQGDSLHEHIANLAG
SPAIKKGILQTVKVVDELVKVMGRHKPENIVIEMARENQTTQKGQ
KNSRERMKRIEEGIKELGSQILKEHPVENTQLQNEKLYLYYLQNG
RDMYVDQELDINRLSDYDVDHIVPQSFLKDDSIDNKVLTRSDKNR
GKSDNVPSEEVVKKMKNYWRQLLNAKLITQRKFDNLTKAERGGLS
ELDKAGFIKRQLVETRQITKHVAQILDSRMNTKYDENDKLIREVK
VITLKSKLVSDFRKDFQFYKVREINNYHHAHDAYLNAVVGTALIK
KYPKLESEFVYGDYKVYDVRKMIAKSEQEIGKATAKYFFYSNIMN
FFKTEITLANGEIRKRPLIETNGETGEIVWDKGRDFATVRKVLSM
PQVNTVKKTEVQTGGFSKESILPKRNSDKLIARKKDWDPKKYGGF
DSPTVAYSVLVVAKVEKGKSKKLKSVKELLGITIMERSSFEKNPI
DFLEAKGYKEVKKDLIIKLPKYSLFELENGRKRMLASAGELQKGN
ELALPSKYVNFLYLASHYEKLKGSPEDNEQKQLFVEQHKHYLDEH
IEQISEFSKRVILADANLDKVLSAYNKHRDKPIREQAENIIHLFT
LTNLGAPAAFKYFDTTIDRKRYTSTKEVLDATLIHQSITGLYETR
IDLSQLGGDSGGSPKKKRKV
ABEmax(7.10)
NLS_ecTadA_{(wild-type)}-(SGGS)-XTEN-(SGGS)₂-
ecTadA7.10_{(W23R H36L}_P48A_R51L_
_{L84F}_A106V_D108N_H123Y_S146C_D147Y_R152P_
_{E155V}_I156F_K157N)-(SGGS)₂-XTEN-(SGGS)₂_nCas9
VRQR_SGGS_NLS
(SEQ ID NO: 201)
MKRTADGSEFESPKKKRKVSEVEFSHEYWMRHALTLAKRAWDERE
VPVGAVLVHNNRVIGEGWNRPIGRHDPTAHAEIMALRQGGLVMQN
YRLIDATLYVTLEPCVMCAGAMIHSRIGRVVFGARDAKTGAAGSL
MDVLHHPGMNHRVEITEGILADECAALLSDFFRMRRQEIKAQKKA
QSSTDSGGSSGGSSGSETPGTSESATPESSGGSSGGSSEVEFSHE
YWMRHALTLAKRARDEREVPVGAVLVLNNRVIGEGWNRAIGLHDP
TAHAEIMALRQGGLVMQNYRLIDATLYVTFEPCVMCAGAMIHSRI
GRVVFGVRNAKTGAAGSLMDVLHYPGMNHRVEITEGILADECAAL
LCYFFRMPRQVFNAQKKAQSSTDSGGSSGGSSGSETPGTSESATP
ESSGGSSGGSDKKYSIGLAIGTNSVGWAVITDEYKVPSKKFKVLG
NTDRHSIKKNLIGALLFDSGETAEATRLKRTARRRYTRRKNRICY
LQEIFSNEMAKVDDSFFHRLEESFLVEEDKKHERHPIFGNIVDEV
AYHEKYPTIYHLRKKLVDSTDKADLRLIYLALAHMIKFRGHFLIE
GDLNPDNSDVDKLFIQLVQTYNQLFEENPINASGVDAKAILSARL
SKSRRLENLIAQLPGEKKNGLFGNLIALSLGLTPNFKSNFDLAED
AKLQLSKDTYDDDLDNLLAQIGDQYADLFLAAKNLSDAILLSDIL
RVNTEITKAPLSASMIKRYDEHHQDLTLLKALVRQQLPEKYKEIF
FDQSKNGYAGYIDGGASQEEFYKFIKPILEKMDGTEELLVKLNRE
DLLRKQRTFDNGSIPHQIHLGELHAILRRQEDFYPFLKDNREKIE
KILTFRIPYYVGPLARGNSRFAWMTRKSEETITPWNFEEVVDKGA
SAQSFIERMTNFDKNLPNEKVLPKHSLLYEYFTVYNELTKVKYVT
EGMRKPAFLSGEQKKAIVDLLFKTNRKVTVKQLKEDYFKKIECFD
SVEISGVEDRFNASLGTYHDLLKIIKDKDFLDNEENEDILEDIVL
TLTLFEDREMIEERLKTYAHLFDDKVMKQLKRRRYTGWGRLSRKL
INGIRDKQSGKTILDFLKSDGFANRNFMQLIHDDSLTFKEDIQKA
QVSGQGDSLHEHIANLAGSPAIKKGILQTVKVVDELVKVMGRHKP
ENIVIEMARENQTTQKGQKNSRERMKRIEEGIKELGSQILKEHPV
ENTQLQNEKLYLYYLQNGRDMYVDQELDINRLSDYDVDHIVPQSF
LKDDSIDNKVLTRSDKNRGKSDNVPSEEVVKKMKNYWRQLLNAKL
ITQRKFDNLTKAERGGLSELDKAGFIKRQLVETRQITKHVAQILD
SRMNTKYDENDKLIREVKVITLKSKLVSDFRKDFQFYKVREINNY
HHAHDAYLNAVVGTALIKKYPKLESEFVYGDYKVYDVRKMIAKSE
QEIGKATAKYFFYSNIMNFFKTEITLANGEIRKRPLIETNGETGE
IVWDKGRDFATVRKVLSMPQVNIVKKTEVQTGGFSKESILPKRNS
DKLIARKKDWDPKKYGGFVSPTVAYSVLVVAKVEKGKSKKLKSVK
ELLGITIMERSSFEKNPIDFLEAKGYKEVKKDLIIKLPKYSLFEL
ENGRKRMLASARELQKGNELALPSKYVNFLYLASHYEKLKGSPED
NEQKQLFVEQHKHYLDEIIEQISEFSKRVILADANLDKVLSAYNK
HRDKPIREQAENIIHLFTLTNLGAPAAFKYFDTTIDRKQYRSTKE
VLDATLIHQSITGLYETRIDLSQLGGD
SGGSKRTADGSEFEPKKKRKV
Exemplary base editors comprise sequences
that are at least least 85%, at least 90%,
at least 95%, at least 98%, at least 99%,
or at least 99.5% identical to any of the
following amino acid sequences:
ABEZe
(SEQ ID NO: 202)
MKRTADGSEFESPKKKRKVSEVEFSHEYWMRHALTLAKRARDERE
VPVGAVLVLNNRVIGEGWNRAIGLHDPTAHAEIMALRPGGLVMPN
YRLIDATLYVTFEPCVMCAGAMIHSRIGRVVFGVRNSKRGAAGSL
MNVLNYPGMNHRVEITEGILADECAALLCDFYRMPRPVFNAPKKA
PSSINSGGSSGGSSGSETPGTSESATPESSGGSSGGSDKKYSIGL
AIGTNSVGWAVITDEYKVPSKKFKVLGNTDRHSIKKNLIGALLFD
SGETAEATRLKRTARRRYTRRKNRICYLPEIFSNEMAKVDDSFFH
RLEESFLVEEDKKHERHPIFGNIVDEVAYHEKYPTIYHLRKKLVD
STDKADLRLIYLALAHMIKFRGHFLIEGDLNPDNSDVDKLFIPLV
PTYNPLFEENPINASGVDAKAILSARLSKSRRLENLIAPLPGEKK
NGLFGNLIALSLGLTPNFKSNFDLAEDAKLPLSKDTYDDDLDNLL
APIGDPYADLFLAAKNLSDAILLSDILRVNTEITKAPLSASMIKR
YDEHHPDLTLLKALVRPPLPEKYKEIFFDPSKNGYAGYIDGGASP
EEFYKFIKPILEKMDGTEELLVKLNREDLLRKPRTFDNGSIPHPI
HLGELHAILRRPEDFYPFLKDNREKIEKILTFRIPYYVGPLARGN
SRFAWMTRKSEETITPWNFEEVVDKGASAPSFIERMTNFDKNLPN
EKVLPKHSLLYEYFTVYNELTKVKYVTEGMRKPAFLSGEPKKAIV
DLLFKTNRKVTVKPLKEDYFKKIECFDSVEISGVEDRFNASLGTY
HDLLKIIKDKDFLDNEENEDILEDIVLTLTLFEDREMIEERLKTY
AHLFDDKVMKPLKRRRYTGWGRLSRKLINGIRDKPSGKTILDFLK
SDGFANRNFMPLIHDDSLTFKEDIPKAPVSGPGDSLHEHIANLAG
SPAIKKGILPTVKVVDELVKVMGRHKPENIVIEMARENPTTPKGP
KNSRERMKRIEEGIKELGSPILKEHPVENTPLPNEKLYLYYLQNG
RDMYVDQELDINRLSDYDVDHTVPQSFLKDDSIDNKVLTRSDKNR
GKSDNVPSEEVVKKMKNYWRQLLNAKLITQRKFDNLTKAERGGLS
ELDKAGFIKRQLVETRQITKHVAQILDSRMNTKYDENDKLIREVK
VITLKSKLVSDFRKDFQFYKVREINNYHHAHDAYLNAVVGTALIK
KYPKLESEFVYGDYKVYDVRKMIAKSEQEIGKATAKYFFYSNIMN
FFKTEITLANGEIRKRPLIETNGETGEIVWDKGRDFATVRKVLSM
PQVNIVKKTEVQTGGFSKESILPKRNSDKLIARKKDWDPKKYGGF
DSPTVAYSVLVVAKVEKGKSKKLKSVKELLGITIMERSSFEKNPI
DFLEAKGYKEVKKDLIIKLPKYSLFELENGRKRMLASAGELQKGN
ELALPSKYVNFLYLASHYEKLKGSPEDNEQKQLFVEQHKHYLDEI
IEQISEFSKRVILADANLDKVLSAYNKHRDKPIREQAENIIHLFT
LTNLGAPAAFKYFDTTIDRKRYTSTKEVLDATLIHQSITGLYETR
IDLSQLGGDSGGSKRTADGSEFEPKKKRKV
ABESe-dimer
(SEQ ID NO: 203)
MKRTADGSEFESPKKKRKVSEVEFSHEYWMRHALTLAKRAWDERE
VPVGAVLVHNNRVIGEGWNRPIGRHDPTAHAEIMALRQGGLVMQN
YRLIDATLYVTLEPCVMCAGAMIHSRIGRVVFGARDAKTGAAGSL
MDVLHHPGMNHRVEITEGILADECAALLSDFFRMRRQEIKAQKKA
QSSTDSGGSSGGSSGSETPGTSESATPESSGGSSGGSSEVEFSHE
YWMRHALTLAKRARDEREVPVGAVLVLNNRVIGEGWNRAIGLHDP
TAHAEIMALRQGGLVMQNYRLIDATLYVTFEPCVMCAGAMIHSRI
GRVVFGVRNSKRGAAGSLMNVLNYPGMNHRVEITEGILADECAAL
LCDFYRMPRQVFNAQKKAQSSINSGGSSGGSSGSETPGTSESATP
ESSGGSSGGSDKKYSIGLAIGTNSVGWAVITDEYKVPSKKFKVLG
NTDRHSIKKNLIGALLFDSGETAEATRLKRTARRRYTRRKNRICY
LQEIFSN
EMAKVDDSFFHRLEESFLVEEDKKHERHPIFGNIVDEVAYHEKYP
TIYHLRKKLVDSTDKADLRLIYLALAHMIKFRGHFLIEGDLNPDN
SDVDKLFIQLVQTYNQLFEENPINASGVDAKAILSARLSKSRRLE
NLIAQLPGEKKNGLFGNLIALSLGLTPNFKSNFDLAEDAKLQLSK
DTYDDDLDNLLAQIGDQYADLFLAAKNLSDAILLSDILRVNTEIT
KAPLSASMIKRYDEHHQDLTLLKALVRQQLPEKYKEIFFDQSKNG
YAGYIDGGASQEEFYKFIKPILEKMDGTEELLVKLNREDLLRKQR
TFDNGSIPHQIHLGELHAILRRQEDFYPFLKDNREKIEKILTFRI
PYYVGPLARGNSRFAWMTRKSEETITPWNFEEVVDKGASAQSFIE
RMTNFDKNLPNEKVLPKHSLLYEYFTVYNELTKVKYVTEGMRKPA
FLSGEQKKAIVDLLFKTNRKVTVKQLKEDYFKKIECFDSVEISGV
EDRFNASLGTYHDLLKIIKDKDFLDNEENEDILEDIVLTLTLFED
REMIEERLKTYAHLFDDKVMKQLKRRRYTGWGRLSRKLINGIRDK
QSGKTILDFLKSDGFANRNFMQLIHDDSLTFKEDIQKAQVSGQGD
SLHEHIANLAGSPAIKKGILQTVKVVDELVKVMGRHKPENIVIEM
ARENQTTQKGQKNSRERMKRIEEGIKELGSQILKEHPVENTQLQN
EKLYLYYLQNGRDMYVDQELDINRLSDYDVDHIVPQSFLKDDSID
NKVLTRSDKNRGKSDNVPSEEVVKKMKNYWRQLLNAKLITQRKFD
NLTKAERGGLSELDKAGFIKRQLVETRQITKHVAQILDSRMNTKY
DENDKLIREVKVITLKSKLVSDFRKDFQFYKVREINNYHHAHDAY
LNAVVGTALIKKYPKLESEFVYGDYKVYDVRKMIAKSEQEIGKAT
AKYFFYSNIMNFFKTEITLANGEIRKRPLIETNGETGEIVWDKGR
DFATVRKVLSMPQVNIVKKTEVQTGGFSKESILPKRNSDKLIARK
KDWDPKKYGGFDSPTVAYSVLVVAKVEKGKSKKLKSVKELLGITI
MERSSFEKNPIDFLEAKGYKEVKKDLIIKLPKYSLFELENGRKRM
LASAGELQKGNELALPSKYVNFLYLASHYEKLKGSPEDNEQKQLF
VEQHKHYLDEIIEQISEFSKRVILADANLDKVLSAYNKHRDKPIR
EQAENIIHLFTLTNLGAPAAFKYFDTTIDRKRYTSTKEVLDATLI
HQSITGLYETRI
DLSQLGGDSGGSKRTADGSEFEPKKKRKV
SaABE8e
(SEQ ID NO: 204)
MKRTADGSEFESPKKKRKVSEVEFSHEYWMRHALTLAKRARDERE
VPVGAVLVLNNRVIGEGWNRAIGLHDPTAHAEIMALRQGGLVMQN
YRLIDATLYVTFEPCVMCAGAMIHSRIGRVVFGVRNSKRGAAGSL
MNVLNYPGMNHRVEITEGILADECAALLCDFYRMPRQVFNAQKKA
QSSINSGGSSGGSSGSETPGTSESATPESSGGSSGGSGKRNYILG
LAIGITSVGYGIIDYETRDVIDAGVRLFKEANVENNEGRRSKRGA
RRLKRRRRHRIQRVKKLLFDYNLLTDHSELSGINPYEARVKGLSQ
KLSEEEFSAALLHLAKRRGVHNVNEVEEDTGNELSTKEQISRNSK
ALEEKYVAELQLERLKKDGEVRGSINRFKTSDYVKEAKQLLKVQK
AYHQLDQSFIDTYIDLLETRRTYYEGPGEGSPFGWKDIKEWYEML
MGHCTYFPEELRSVKYAYNADLYNALNDLNNLVITRDENEKLEYY
EKFQIIENVFKQKKKPTLKQIAKEILVNEEDIKGYRVTSTGKPEF
TNLKVYHDIKDITARKEIIENAELLDQIAKILTIYQSSEDIQEEL
TNLNSELTQEEIEQISNLKGYTGTHNLSLKAINLILDELWHTNDN
QIAIFNRLKLVPKKVDLSQQKEIPTTLVDDFILSPVVKRSFIQSI
KVINAIIKKYGLPNDIIIELAREKNSKDAQKMINEMQKRNRQTNE
RIEEIIRTTGKENAKYLI
EKIKLHDMQEGKCLYSLEAIPLEDLLNNPFNYEVDHIIPRSVSFD
NSFNNKVLVKQEENSKKGNRTPFQYLSSSDSKISYETFKKHILNL
AKGKGRISKTKKEYLLEERDINRFSVQKDFINRNLVDTRYATRGL
MNLLRSYFRVNNLDVKVKSINGGFTSFLRRKWKFKKERNKGYKHH
AEDALIIANADFIFKEWKKLDKAKKVMENQMFEEKQAESMPEIET
EQEYKEIFITPHQIKHIKDFKDYKYSHRVDKKPNRELINDTLYST
RKDDKGNTLIVNNLNGLYDKDNDKLKKLINKSPEKLLMYHHDPQT
YQKLKLIMEQYGDEKNPLYKYYEETGNYLTKYSKKDNGPVIKKIK
YYGNKLNAHLDITDDYPNSRNKVVKLSLKPYRFDVYLDNGVYKFV
TVKNLDVIKKENYYEVNSKCYEEAKKLKKISNQAEFIASFYNNDL
IKINGELYRVIGVNNDLLNRIEVNMIDITYREYLENMNDKRPPRI
IKTIASKTQSIKKYSTDILGNLYEVKSKKHPQI
IKKGSGGSKRTADGSEFEPKKKRKV
SaABESe-dimer
(SEQ ID NO: 205)
MKRTADGSEFESPKKKRKVSEVEFSHEYWMRHALTLAKRAWDERE
VPVGAVLVHNNRVIGEGWNRPIGRHDPTAHAEIMALRQGGLVMQN
YRLIDATLYVTLEPCVMCAGAMIHSRIGRVVFGARDAKTGAAGSL
MDVLHHPGMNHRVEITEGILADECAALLSDFFRMRRQEIKAQKKA
QSSTDSGGSSGGSSGSETPGTSESATPESSGGSSGGSSEVEFSHE
YWMRHALTLAKRARDEREVPVGAVLVLNNRVIGEGWNRAIGLHDP
TAHAEIMALRQGGLVMQNYRLIDATLYVTFEPCVMCAGAMIHSRI
GRVVFGVRNSKRGAAGSLMNVLNYPGMNHRVEITEGILADECAAL
LCDFYRMPRQVFNAQKKAQSSINSGGSSGGSSGSETPGTSESATP
ESSGGSSGGSGKRNYILGLAIGITSVGYGIIDYETRDVIDAGVRL
FKEANVENNEGRRSKRGARRLKRRRRHRIQRVKKLLFDYNLLTDH
SELSGINPYEARVKGLSQKLSEEEFSAALLHLAKRRGVHNVNEVE
EDTGNELSTKEQISRNSKALEEKYVAELQLERLKKDGEVRGSINR
FKTSDYVKEAKQLLKVQKAYHQLDQSFIDTYIDLLETRRTYYEGP
GEGSPFGWKDIKEWYEMLMGHCTYFPEELRSVKYAYNADLYNALN
DLNNLVITRDENEKLEYYEKFQIIENVFKQKKKPTLKQIAKEILV
NEEDIKGYRVTSTGKPEFTNLKVYHDIKDITARKEIIENAELLDQ
IAKILTIYQSSEDIQEELTNLNSELTQEEIEQISNLKGYTGTHNL
SLKAINLILDELWHTNDNQIAIFNRLKLVPKKVDLSQQKEIPTTL
VDDFILSPVVKRSFIQSIKVINAIIKKYGLPNDIIIELAREKNSK
DAQKMINEMQKRNRQTNERIEEIIRTTGKENAKYLIEKIKLHDMQ
EGKCLYSLEAIPLEDLLNNPFNYEVDHIIPRSVSFDNSFNNKVLV
KQEENSKKGNRTPFQYLSSSDSKISYETFKKHILNLAKGKGRISK
TKKEYLLEERDINRFSVQKDFINRNLVDTRYATRGLMNLLRSYFR
VNNLDVKVKSINGGFTSFLRRKWKFKKERNKGYKHHAEDALIIAN
ADFIFKEWKKLDKAKKVMENQMFEEKQAESMPEIETEQEYKEIFI
TPHQIKHIKDFKDYKYSHRVDKKPNRELINDTLYSTRKDDKGNTL
IVNNLNGLYDKDNDKLKKLINKSPEKLLMYHHDPQTYQKLKLIME
QYGDEKNPLYKYYEETGNYLTKYSKKDNGPVIKKIKYYGNKLNAH
LDITDDYPNSRNKVVKLSLKPYRFDVYLDNGVYKFVTVKNLDVIK
KENYYEVNSKCYEEAKKLKKISNQAEFIASFYNNDLIKINGELYR
VIGVNNDLLNRIEVNMIDITYREYLENMNDKRPPRIIKTIASKTQ
SIKKYSTDILGNLYEVKSKKHPQIIKKGSGGSKRTADGSEFEPKK
KRKV
LbABE8e
(SEQ ID NO: 206)
MKRTADGSEFESPKKKRKVSEVEFSHEYWMRHALTLAKRARDERE
VPVGAVLVLNNRVIGEGWNRAIGLHDPTAHAEIMALRQGGLVMQN
YRLIDATLYVTFEPCVMCAGAMIHSRIGRVVFGVRNSKRGAAGSL
MNVLNYPGMNHRVEITEGILADECAALLCDFYRMPRQVFNAQKKA
QSSINSGGSSGGSSGSETPGTSESATPESSGGSSGGSSKLEKFTN
CYSLSKTLRFKAIPVGKTQENIDNKRLLVEDEKRAEDYKGVKKLL
DRYYLSFINDVLHSIKLKNLNNYISLFRKKTRTEKENKELENLEI
NLRKEIAKAFKGNEGYKSLFKKDIIETILPEFLDDKDEIALVNSF
NGFTTAFTGFFDNRENMFSEEAKSTSIAFRCINENLTRYISNMDI
FEKVDAIFDKHEVQEIKEKILNSDYDVEDFFEGEFFNFVLTQEGI
DVYNAIIGGFVTESGEKIKGLNEYINLYNQKTKQKLPKFKPLYKQ
VLSDRESLSFYGEGYTSDEEVLEVFRNTLNKNSEIFSSIKKLEKL
FKNFDEYSSAGIFVKNGPAISTISKDIFGEWNVIRDKWNAEYDDI
HLKKKAVVTEKYEDDRRKSFKKIGSFSLEQLQEYADADLSVVEKL
KEIIIQKVDEIYKVYGSSEKLFDADFVLEKSLKKNDAVVAIMKDL
LDSVKSFENYIKAFFGEGKETNRDESFYGDFVLAYDILLKVDHIY
DAIRNYVTQKPYSKDKFKLYFQNPQFMGGWDKDKETDYRATILRY
GSKYYLAIMDKKYAKCLQKIDKDDVNGNYEKINYKLLPGPNKMLP
KVFFSKKWMAYYNPSEDIQKIYKNGTFKKGDMFNLNDCHKLIDFF
KDSISRYPKWSNAYDFNFSETEKYKDIAGFYREVEEQGYKVSFES
ASKKEVDKLVEEGKLYMFQIYNKDFSDKSHGTPNLHTMYFKLLFD
ENNHGQIRLSGGAELFMRRASLKKEELVVHPANSPIANKNPDNPK
KTTTLSYDVYKDKRFSEDQYELHIPIAINKCPKNIFKINTEVRVL
LKHDDNPYVIGIARGERNLLYIVVVDGKGNIVEQYSLNEIINNFN
GIRIKTDYHSLLDKKEKERFEARQNWTSIENIKELKAGYISQVVH
KICELVEKYDAVIALEDLNSGFKNSRVKVEKQVYQKFEKMLIDKL
NYMVDKKSNPCATGGALKGYQITNKFESFKSMSTQNGFIFYIPAW
LTSKIDPSTGFVNLLKTKYTSIADSKKFISSFDRIMYVPEEDLFE
FALDYKNFSRTDADYIKKWKLYSYGNRIRIFRNPKKNNVFDWEEV
CLTSAYKELFNKYGINYQQGDIRALLCEQSDKAFYSSFMALMSLM
LQMRNSITGRTDVDFLISPVKNSDGIFYDSRNYEAQENAILPKNA
DANGAYNIARKVLWAIGQFKKAEDEKLDKVKIAISNKEWLEYAQT
SVKSGGSKRTADGSEFEPKKKRKV
LbABE8e-dimer
(SEQ ID NO: 207)
MKRTADGSEFESPKKKRKVSEVEFSHEYWMRHALTLAKRAWDERE
VPVGAVLVHNNRVIGEGWNRPIGRHDPTAHAEIMALRQGGLVMQN
YRLIDATLYVTLEPCVMCAGAMIHSRIGRVVFGARDAKTGAAGSL
MDVLHHPGMNHRVEITEGILADECAALLSDFFRMRRQEIKAQKKA
QSSTDSGGSSGGSSGSETPGTSESATPESSGGSSGGSSEVEFSHE
YWMRHALTLAKRARDEREVPVGAVLVLNNRVIGEGWNRAIGLHDP
TAHAEIMALRQGGLVMQNYRLIDATLYVTFEPCVMCAGAMIHSRI
GRVVFGVRNSKRGAAGSLMNVLNYPGMNHRVEITEGILADECAAL
LCDFYRMPRQVFNAQKKAQSSINSGGSSGGSSGSETPGTSESATP
ESSGGSSGGSSKLEKFTNCYSLSKTLRFKAIPVGKTQENIDNKRL
LVEDEKRAEDYKGVKKLLDRYYLSFINDVLHSIKLKNLNNYISLF
RKKTRTEKENKELENLEINLRKEIAKAFKGNEGYKSLFKKDIIET
ILPEFLDDKDEIALVNSFNGFTTAFTGFFDNRENMFSEEAKSTSI
AFRCINENLTRYISNMDIFEKVDAIFDKHEVQEIKEKILNSDYDV
EDFFEGEFFNFVLTQEGIDVYNAIIGGFVTESGEKIKGLNEYINL
YNQKTKQKLPKFKPLYKQVLSDRESLSFYGEGYTSDEEVLEVFRN
TLNKNSEIFSSIKKLEKLFKNFDEYSSAGIFVKNGPAISTISKDI
FGEWNVIRDKWNAEYDDIHLKKKAVVTEKYEDDRRKSFKKIGSFS
LEQLQEYADADLSVVEKLKEIIIQKVDEIYKVYGSSEKLFDADFV
LEKSLKKNDAVVAIMKDLLDSVKSFENYIKAFFGEGKETNRDESF
YGDFVLAYDILLKVDHIYDAIRNYVTQKPYSKDKFKLYFQNPQFM
GGWDKDKETDYRATILRYGSKYYLAIMDKKYAKCLQKIDKDDVNG
NYEKINYKLLPGPNKMLPKVFFSKKWMAYYNPSEDIQKIYKNGTF
KKGDMFNLNDCHKLIDFFKDSISRYPKWSNAYDFNFSETEKYKDI
AGFYREVEEQGYKVSFESASKKEVDKLVEEGKLYMFQIYNKDFSD
KSHGTPNLHTMYFKLLFDENNHGQIRLSGGAELFMRRASLKKEEL
VVHPANSPLVNKNPDNPKKTTTLSYDVYKDKRFSEDQYELHIPIA
INKCPKNIFKINTEVRVLLKHDDNPYVIGIARGERNLLYIVVVDG
KGNIVEQYSLNEIINNFNGIRIKTDYHSLLDKKEKERFEARQNWT
SIENIKELKAGYISQVVHKICELVEKYDAVIALEDLNSGFKNSRV
KVEKQVYQKFEKMLIDKLNYMVDKKSNPCATGGALKGYQITNKFE
SFKSMSTQNGFIFYIPAWLTSKIDPSTGFVNLLKTKYTSIADSKK
FISSFDRIMYVPEEDLFEFALDYKNFSRTDADYIKKWKLYSYGNR
IRIFRNPKKNNVFDWEEVCLTSAYKELFNKYGINYQQGDIRALLC
EQSDKAFYSSFMALMSLMLQMRNSITGRTDVDFLISPVKNSDGIF
YDSRNYEAQENAILPKNADANGAYNIARKVLWAIGQFKKAEDEKL
DKVKIAISNKEWLEYAQTSVKSGGSKRTADGSEFEPKKKR
KV
LbABE7.10
(SEQ ID NO: 208)
MKRTADGSEFESPKKKRKVSEVEFSHEYWMRHALTLAKRAWDERE
VPVGAVLVHNNRVIGEGWNRPIGRHDPTAHAEIMALRQGGLVMQN
YRLIDATLYVTLEPCVMCAGAMIHSRIGRVVFGARDAKTGAAGSL
MDVLHHPGMNHRVEITEGILADECAALLSDFFRMRRQEIKAQKKA
QSSTDSGGSSGGSSGSETPGTSESATPESSGGSSGGSSEVEFSHE
YWMRHALTLAKRARDEREVPVGAVLVLNNRVIGEGWNRAIGLHDP
TAHAEIMALRQGGLVMQNYRLIDATLYVTFEPCVMCAGAMIHSRI
GRVVFGVRNAKTGAAGSLMDVLHYPGMNHRVEITEGILADECAAL
LCYFFRMPRQVFNAQKKAQSSTDSGGSSGGSSGSETPGTSESATP
ESSGGSSGGSSKLEKFTNCYSLSKTLRFKAIPVGKTQENIDNKRL
LVEDEKRAEDYKGVKKLLDRYYLSFINDVLHSIKLKNLNNYISLF
RKKTRTEKENKELENLEINLRKEIAKAFKGNEGYKSLFKKDIIET
ILPEFLDDKDEIALVNSFNGFTTAFTGFFDNRENMFSEEAKSTSI
AFRCINENLTRYISNMDIFEKVDAIFDKHEVQEIKEKILNSDYDV
EDFFEGEFFNFVLTQEGIDVYNAIIGGFVTESGEKIKGLNEYINL
YNQKTKQKLPKFKPLYKQVLSDRESLSFYGEGYTSDEEVLEVFRN
TLNKNSEIFSSIKKLEKLFKNFDEYSSAGIFVKNGPAISTISKDI
FGEWNVIRDKWNAEYDDIHLKKKAVVTEKYEDDRRKSFKKIGSFS
LEQLQEYADADLSVVEKLKEIIIQKVDEIYKVYGSSEKLFDADFV
LEKSLKKNDAVVAIMKDLLDSVKSFENYIKAFFGEGKETNRDESF
YGDFVLAYDILLKVDHIYDAIRNYVTQKPYSKDKFKLYFQNPQFM
GGWDKDKETDYRATILRYGSKYYLAIMDKKYAKCLQKIDKDDVNG
NYEKINYKLLPGPNKMLPKVFFSKKWMAYYNPSEDIQKIYKNGTF
KKGDMFNLNDCHKLIDFFKDSISRYPKWSNAYDFNFSETEKYKDI
AGFYREVEEQGYKVSFESASKKEVDKLVEEGKLYMFQIYNKDFSD
KSHGTPNLHTMYFKLLFDENNHGQIRLSGGAELFMRRASLKKEEL
VVHPANSPIANKNPDNPKKTTTLSYDVYKDKRFSEDQYELHIPIA
INKCPKNIFKINTEVRVLLKHDDNPYVIGIARGERNLLYIVVVDG
KGNIVEQYSLNEIINNFNGIRIKTDYHSLLDKKEKERFEARQNWT
SIENIKELKAGYISQVVHKICELVEKYDAVIALEDLNSGFKNSRV
KVEKQVYQKFEKMLIDKLNYMVDKKSNPCATGGALKGYQITNKFE
SFKSMSTQNGFIFYIPAWLTSKIDPSTGFVNLLKTKYTSIADSKK
FISSFDRIMYVPEEDLFEFALDYKNFSRTDADYIKKWKLYSYGNR
IRIFRNPKKNNVFDWEEVCLTSAYKELFNKYGINYQQGDIRALLC
EQSDKAFYSSFMALMSLMLQMRNSITGRTDVDFLISPVKNSDGIF
YDSRNYEAQENAILPKNADANGAYNIARKVLWAIGQFKKAEDEKL
DKVKIAISNKEWLEYAQTSVKSGGSKRTADGSEFEPKKKR
KV
enAsABE8e
(SEQ ID NO: 209)
MKRTADGSEFESPKKKRKVSEVEFSHEYWMRHALTLAKRARDERE
VPVGAVLVLNNRVIGEGWNRAIGLHDPTAHAEIMALRQGGLVMQN
YRLIDATLYVTFEPCVMCAGAMIHSRIGRVVFGVRNSKRGAAGSL
MNVLNYPGMNHRVEITEGILADECAALLCDFYRMPRQVFNAQKKA
QSSINSGGSSGGSSGSETPGTSESATPESSGGSSGGSMTQFEGFT
NLYQVSKTLRFELIPQGKTLKHIQEQGFIEEDKARNDHYKELKPI
IDRIYKTYADQCLQLVQLDWENLSAAIDSYRKEKTEETRNALIEE
QATYRNAIHDYFIGRTDNLTDAINKRHAEIYKGLFKAELFNGKVL
KQLGTVTTTEHENALLRSFDKFTTYFSGFYRNRKNVFSAEDISTA
IPHRIVQDNFPKFKENCHIFTRLITAVPSLREHFENVKKAIGIFV
STSIEEVFSFPFYNQLLTQTQIDLYNQLLGGISREAGTEKIKGLN
EVLNLAIQKNDETAHIIASLPHRFIPLFKQILSDRNTLSFILEEF
KSDEEVIQSFCKYKTLLRNENVLETAEALFNELNSIDLTHIFISH
KKLETISSALCDHWDTLRNALYERRISELTGKITKSAKEKVQRSL
KHEDINLQEIISAAGKELSEAFKQKTSEILSHAHAALDQPLPTTL
KKQEEKEILK
SQLDSLLGLYHLLDWFAVDESNEVDPEFSARLTGIKLEMEPSLSF
YNKARNYATKKPYSVEKFKLNFQMPTLARGWDVNREKNNGAILFV
KNGLYYLGIMPKQKGRYKALSFEPTEKTSEGFDKMYYDYFPDAAK
MIPKCSTQLKAVTAHFQTHTTPILLSNNFIEPLEITKEIYDLNNP
EKEPKKFQTAYAKKTGDQKGYREALCKWIDFTRDFLSKYTKTTSI
DLSSLRPSSQYKDLGEYYAELNPLLYHISFQRIAEKEIMDAVETG
KLYLFQIYNKDFAKGHHGKPNLHTLYWTGLFSPENLAKTSIKLNG
QAELFYRPKSRMKRMAHRLGEKMLNKKLKDQKTPIPDTLYQELYD
YVNHRLSHDLSDEARALLPNVITKEVSHEIIKDRRFTSDKFFFHV
PITLNYQAANSPSKFNQRVNAYLKEHPETPIIGIARGERNLIYIT
VIDSTGKILEQRSLNTIQQFDYQKKLDNREKERVAARQAWSVVGT
IKDLKQGYLSQVIHEIVDLMIHYQAVVVLENLNFGFKSKRTGIAE
KAVYQQFEKMLIDKLNCLVLKDYPAEKVGGVLNPYQLTDQFTSFA
KMGTQSGFLFYVPAPYTSKIDPLTGFVDPFVWKTIKNHESRKHFL
EGFDFLHYDVKTGDFILHFKMNRNLSFQRGLPGFMPAWDIVFEKN
ETQFDAKGTPFIAGKRIVPVIENHRFTGRYRDLYPANELIALLEE
KGIVFRDGSNILPKLLENDDSHAIDTMVALIRSVLQMRNSNAATG
EDYINSPVRDLNGVCFDSRFQNPEWPMDADANGAYHIALKGQLLL
NHLKESKDLKLQNGISNQDWLAYIQELRNSGGSKRTADGSEFEPK
KKRKV
enAsABESe-dimer
(SEQ ID NO: 210)
MKRTADGSEFESPKKKRKVSEVEFSHEYWMRHALTLAKRAWDERE
VPVGAVLVHNNRVIGEGWNRPIGRHDPTAHAEIMALRQGGLVMQN
YRLIDATLYVTLEPCVMCAGAMIHSRIGRVVFGARDAKTGAAGSL
MDVLHHPGMNHRVEITEGILADECAALLSDFFRMRRQEIKAQKKA
QSSTDSGGSSGGSSGSETPGTSESATPESSGGSSGGSSEVEFSHE
YWMRHALTLAKRARDEREVPVGAVLVLNNRVIGEGWNRAIGLHDP
TAHAEIMALRQGGLVMQNYRLIDATLYVTFEPCVMCAGAMIHSRI
GRVVFGVRNSKRGAAGSLMNVLNYPGMNHRVEITEGILADECAAL
LCDFYRMPRQVFNAQKKAQSSINSGGSSGGSSGSETPGTSESATP
ESSGGSSGGSMTQFEGFTNLYQVSKTLRFELIPQGKTLKHIQEQG
FIEEDKARNDHYKELKPIIDRIYKTYADQCLQLVQLDWENLSAAI
DSYRKEKTEETRNALIEEQATYRNAIHDYFIGRTDNLTDAINKRH
AEIYKGLFKAELFNGKVLKQLGTVTTTEHENALLRSFDKFTTYFS
GFYRNRKNVFSAEDISTAIPHRIVQDNFPKFKENCHIFTRLITAV
PSLREHFENVKKAIGIFVSTSIEEVFSFPFYNQLLTQTQIDLYNQ
LLGGISREAGTEKIKGLNEVLNLAIQKNDETAHIIASLPHRFIPL
FKQILSDRNTLSFILEEFKSDEEVIQSFCKYKTLLRNENVLETAE
ALFNELNSIDLTHIFISHKKLETISSALCDHWDTLRNALYERRIS
ELTGKITKSAKEKVQRSLKHEDINLQEIISAAGKELSEAFKQKTS
EILSHAHAALDQPLPTTLKKQEEKEILKSQLDSLLGLYHLLDWFA
VDESNEVDPEFSARLTGIKLEMEPSLSFYNKARNYATKKPYSVEK
FKLNFQMPTLARGWDVNREKNNGAILFVKNGLYYLGIMPKQKGRY
KALSFEPTEKTSEGFDKMYYDYFPDAAKMIPKCSTQLKAVTAHFQ
THTTPILLSNNFIEPLEITKEIYDLNNPEKEPKKFQTAYAKKTGD
QKGYREALCKWIDFTRDFLSKYTKTTSIDLSSLRPSSQYKDLGEY
YAELNPLLYHISFQRIAEKEIMDAVETGKLYLFQIYNKDFAKGHH
GKPNLHTLYWTGLFSPENLAKTSIKLNGQAELFYRPKSRMKRMAH
RLGEKMLNKKLKDQKTPIPDTLYQELYDYVNHRLSHDLSDEARAL
LPNVITKEVSHEIIKDRRFTSDKFFFHVPITLNYQAANSPSKFNQ
RVNAYLKEHPETPIIGIARGERNLIYITVIDSTGKILEQRSLNTI
QQFDYQKKLDNREKERVAARQAWSVVGTIKDLKQGYLSQVIHEIV
DLMIHYQAVVVLENLNFGFKSKRTGIAEKAVYQQFEKMLIDKLNC
LVLKDYPAEKVGGVLNPYQLTDQFTSFAKMGTQSGFLFYVPAPYT
SKIDPLTGFVDPFVWKTIKNHESRKHFLEGFDFLHYDVKTGDFIL
HFKMNRNLSFQRGLPGFMPAWDIVFEKNETQFDAKGTPFIAGKRI
VPVIENHRFTGRYRDLYPANELIALLEEKGIVFRDGSNILPKLLE
NDDSHAIDTMVALIRSVLQMRNSNAATGEDYINSPVRDLNGVCFD
SRFQNPEWPMDADANGAYHIALKGQLLLNHLKESKDLKLQNGISN
QDWLAYIQELRNSGGSKRTADGSEFEPKKKRKV
enAsABE7.10
(SEQ ID NO: 211)
MKRTADGSEFESPKKKRKVSEVEFSHEYWMRHALTLAKRAWDERE
VPVGAVLVHNNRVIGEGWNRPIGRHDPTAHAEIMALRQGGLVMQN
YRLIDATLYVTLEPCVMCAGAMIHSRIGRVVFGARDAKTGAAGSL
MDVLHHPGMNHRVEITEGILADECAALLSDFFRMRRQEIKAQKKA
QSSTDSGGSSGGSSGSETPGTSESATPESSGGSSGGSSEVEFSHE
YWMRHALTLAKRARDEREVPVGAVLVLNNRVIGEGWNRAIGLHDP
TAHAEIMALRQGGLVMQNYRLIDATLYVTFEPCVMCAGAMIHSRI
GRVVFGVRNAKTGAAGSLMDVLHYPGMNHRVEITEGILADECAAL
LCYFFRMPRQVFNAQKKAQSSTDSGGSSGGSSGSETPGTSESATP
ESSGGSSGGSMTQFEGFTNLYQVSKTLRFELIPQGKTLKHIQEQG
FIEEDKARNDHYKELKPIIDRIYKTYADQCLQLVQLDWENLSAAI
DSYRKEKTEETRNALIEEQATYRNAIHDYFIGRTDNLTDAINKRH
AEIYKGLFKAELFNGKVLKQLGTVTTTEHENALLRSFDKFTTYFS
GFYRNRKNVFSAEDISTAIPHRIVQDNFPKFKENCHIFTRLITAV
PSLREHFENVKKAIGIFVSTSIEEVFSFPFYNQLLTQTQIDLYNQ
LLGGISREAGTEKIKGLNEVLNLAIQKNDETAHIIASLPHRFIPL
FKQILSDRNTLSFILEEFKSDEEVIQSFCKYKTLLRNENVLETAE
ALFNELNSIDLTHIFISHKKLETISSALCDHWDTLRNALYERRIS
ELTGKITKSAKEKVQRSLKHEDINLQEIISAAGKELSEAFKQKTS
EILSHAHAALDQPLPTTLKKQEEKEILKSQLDSLLGLYHLLDWFA
VDESNEVDPEFSARLTGIKLEMEPSLSFYNKARNYATKKPYSVEK
FKLNFQMPTLARGWDVNREKNNGAILFVKNGLYYLGIMPKQKGRY
KALSFEPTEKTSEGFDKMYYDYFPDAAKMIPKCSTQLKAVTAHFQ
THTTPILLSNNFIEPLEITKEIYDLNNPEKEPKKFQTAYAKKTGD
QKGYREALCKWIDFTRDFLSKYTKTTSIDLSSLRPSSQYKDLGEY
YAELNPLLYHISFQRIAEKEIMDAVETGKLYLFQIYNKDFAKGHH
GKPNLHTLYWTGLFSPENLAKTSIKLNGQAELFYRPKSRMKRMAH
RLGEKMLNKKLKDQKTPIPDTLYQELYDYVNHRLSHDLSDEARAL
LPNVITKEVSHEIIKDRRFTSDKFFFHVPITLNYQAANSPSKFNQ
RVNAYLKEHPETPIIGIARGERNLIYITVIDSTGKILEQRSLNTI
QQFDYQKKLDNREKERVAARQAWSVVGTIKDLKQGYLSQVIHEIV
DLMIHYQAVVVLENLNFGFKSKRTGIAEKAVYQQFEKMLIDKLNC
LVLKDYPAEKVGGVLNPYQLTDQFTSFAKMGTQSGFLFYVPAPYT
SKIDPLTGFVDPFVWKTIKNHESRKHFLEGFDFLHYDVKTGDFIL
HFKMNRNLSFQRGLPGFMPAWDIVFEKNETQFDAKGTPFIAGKRI
VPVIENHRFTGRYRDLYPANELIALLEEKGIVFRDGSNILPKLLE
NDDSHAIDTMVALIRSVLQMRNSNAATGEDYINSPVRDLNGVCFD
SRFQNPEWPMDADANGAYHIALKGQLLLNHLKESKDLKLQNGISN
QDWLAYIQELRNSGGSKRTADGSEFEPKKKRKV
SpCas9NG-ABE8e (“NG-ABEZe”)
(SEQ ID NO: 212)
MKRTADGSEFESPKKKRKVSEVEFSHEYWMRHALTLAKRARDERE
VPVGAVLVLNNRVIGEGWNRAIGLHDPTAHAEIMALRQGGLVMQN
YRLIDATLYVTFEPCVMCAGAMIHSRIGRVVFGVRNSKRGAAGSL
MNVLNYPGMNHRVEITEGILADECAALLCDFYRMPRQVFNAQKKA
QSSINSGGSSGGSSGSETPGTSESATPESSGGSSGGSDKKYSIGL
AIGTNSVGWAVITDEYKVPSKKFKVLGNTDRHSIKKNLIGALLFD
SGETAEATRLKRTARRRYTRRKNRICYLQEIFSNEMAKVDDSFFH
RLEESFLVEEDKKHERHPIFGNIVDEVAYHEKYPTIYHLRKKLVD
STDKADLRLIYLALAHMIKFRGHFLIEGDLNPDNSDVDKLFIQLV
QTYNQLFEENPINASGVDAKAILSARLSKSRRLENLIAQLPGEKK
NGLFGNLIALSLGLTPNFKSNFDLAEDAKLQLSKDTYDDDLDNLL
AQIGDQYADLFLAAKNLSDAILLSDILRVNTEITKAPLSASMIKR
YDEHHQDLTLLKALVRQQLPEKYKEIFFDQSKNGYAGYIDGGASQ
EEFYKFIKPILEKMDGTEELLVKLNREDLLRKQRTFDNGSIPHQI
HLGELHAILRRQEDFYPFLKDNREKIEKILTFRIPYYVGPLARGN
SRFAWMTRKSEETITPWNFEEVVDKGASAQSFIERMTNFDKNLPN
EKVLPKHSLLYEYFTVYNELTKVKYVTEGMRKPAFLSGEQKKAIV
DLLFKTNRKVTVKQLKEDYFKKIECFDSVEISGVEDRFNASLGTY
HDLLKIIKDKDFLDNEENEDILEDIVLTLTLFEDREMIEERLKTY
AHLFDDKVMKQLKRRRYTGWGRLSRKLINGIRDKQSGKTILDFLK
SDGFANRNFMQLIHDDSLTFKEDIQKAQVSGQGDSLHEHIANLAG
SPAIKKGILQTVKVVDELVKVMGRHKPENIVIEMARENQTTQKGQ
KNSRERMKRIEEGIKELGSQILKEHPVENTQLQNEKLYLYYLQNG
RDMYVDQELDINRLSDYDVDHIVPQSFLKDDSIDNKVLTRSDKNR
GKSDNVPSEEVVKKMKNYWRQLLNAKLITQRKFDNLTKAERGGLS
ELDKAGFIKRQLVETRQITKHVAQILDSRMNTKYDENDKLIREVK
VITLKSKLVSDFRKDFQFYKVREINNYHHAHDAYLNAVVGTALIK
KYPKLESEFVYGDYKVYDVRKMIAKSEQEIGKATAKYFFYSNIMN
FFKTEITLANGEIRKRPLIETNGETGEIVWDKGRDFATVRKVLSM
PQVNIVKKTEVQTGGFSKESIRPKRNSDKLIARKKDWDPKKYGGF
VSPTVAYSVLVVAKVEKGKSKKLKSVKELLGITIMERSSFEKNPI
DFLEAKGYKEVKKDLIIKLPKYSLFELENGRKRMLASARFLQKGN
ELALPSKYVNFLYLASHYEKLKGSPEDNEQKQLFVEQHKHYLDEI
IEQISEFSKRVILADANLDKVLSAYNKHRDKPIREQAENIIHLFT
LTNLGAPRAFKYFDTTIDRKVYRSTKEVLDATLIHQSITGLYETR
IDLSQLGGDSGGSKRTADGSEFEPKKKRKV
NG-ABE8e-dimer
(SEQ ID NO: 213)
MKRTADGSEFESPKKKRKVSEVEFSHEYWMRHALTLAKRAWDERE
VPVGAVLVHNNRVIGEGWNRPIGRHDPTAHAEIMALRQGGLVMQN
YRLIDATLYVTLEPCVMCAGAMIHSRIGRVVFGARDAKTGAAGSL
MDVLHHPGMNHRVEITEGILADECAALLSDFFRMRRQEIKAQKKA
QSSTDSGGSSGGSSGSETPGTSESATPESSGGSSGGSSEVEFSHE
YWMRHALTLAKRARDEREVPVGAVLVLNNRVIGEGWNRAIGLHDP
TAHAEIMALRQGGLVMQNYRLIDATLYVTFEPCVMCAGAMIHSRI
GRVVFGVRNSKRGAAGSLMNVLNYPGMNHRVEITEGILADECAAL
LCDFYRMPRQVFNAQKKAQSSINSGGSSGGSSGSETPGTSESATP
ESSGGSSGGSDKKYSIGLAIGTNSVGWAVITDEYKVPSKKFKVLG
NTDRHSIKKNLIGALLFDSGETAEATRLKRTARRRYTRRKNRICY
LQEIFSN
EMAKVDDSFFHRLEESFLVEEDKKHERHPIFGNIVDEVAYHEKYP
TIYHLRKKLVDSTDKADLRLIYLALAHMIKFRGHFLIEGDLNPDN
SDVDKLFIQLVQTYNQLFEENPINASGVDAKAILSARLSKSRRLE
NLIAQLPGEKKNGLFGNLIALSLGLTPNFKSNFDLAEDAKLQLSK
DTYDDDLDNLLAQIGDQYADLFLAAKNLSDAILLSDILRVNTEIT
KAPLSASMIKRYDEHHQDLTLLKALVRQQLPEKYKEIFFDQSKNG
YAGYIDGGASQEEFYKFIKPILEKMDGTEELLVKLNREDLLRKQR
TFDNGSIPHQIHLGELHAILRRQEDFYPFLKDNREKIEKILTFRI
PYYVGPLARGNSRFAWMTRKSEETITPWNFEEVVDKGASAQSFIE
RMTNFDKNLPNEKVLPKHSLLYEYFTVYNELTKVKYVTEGMRKPA
FLSGEQKKAIVDLLFKTNRKVTVKQLKEDYFKKIECFDSVEISGV
EDRFNASLGTYHDLLKIIKDKDFLDNEENEDILEDIVLTLTLFED
REMIEERLKTYAHLFDDKVMKQLKRRRYTGWGRLSRKLINGIRDK
QSGKTILDFLKSDGFANRNFMQLIHDDSLTFKEDIQKAQVSGQGD
SLHEHIANLAGSPAIKKGILQTVKVVDELVKVMGRHKPENIVIEM
ARENQTTQKGQKNSRERMKRIEEGIKELGSQILKEHPVENTQLQN
EKLYLYYLQNGRDMYVDQELDINRLSDYDVDHIVPQSFLKDDSID
NKVLTRSDKNRGKSDNVPSEEVVKKMKNYWRQLLNAKLITQRKFD
NLTKAERGGLSELDKAGFIKRQLVETRQITKHVAQILDSRMNTKY
DENDKLIREVKVITLKSKLVSDFRKDFQFYKVREINNYHHAHDAY
LNAVVGTALIKKYPKLESEFVYGDYKVYDVRKMIAKSEQEIGKAT
AKYFFYSNIMNFFKTEITLANGEIRKRPLIETNGETGEIVWDKGR
DFATVRKVLSMPQVNIVKKTEVQTGGFSKESIRPKRNSDKLIARK
KDWDPKKYGGFVSPTVAYSVLVVAKVEKGKSKKLKSVKELLGITI
MERSSFEKNPIDFLEAKGYKEVKKDLIIKLPKYSLFELENGRKRM
LASARFLQKGNELALPSKYVNFLYLASHYEKLKGSPEDNEQKQLF
VEQHKHYLDEIIEQISEFSKRVILADANLDKVLSAYNKHRDKPIR
EQAENIIHLFTLTNLGAPRAFKYFDTTIDRKVYRSTKEVLDATLI
HQSITGLYETRI
DLSQLGGDSGGSKRTADGSEFEPKKKRKV
SaKKH-ABESe (“KKH-ABE8e”)
(SEQ ID NO: 214)
MKRTADGSEFESPKKKRKVSEVEFSHEYWMRHALTLAKRARDERE
VPVGAVLVLNNRVIGEGWNRAIGLHDPTAHAEIMALRQGGLVMQN
YRLIDATLYVTFEPCVMCAGAMIHSRIGRVVFGVRNSKRGAAGSL
MNVLNYPGMNHRVEITEGILADECAALLCDFYRMPRQVFNAQKKA
QSSINSGGSSGGSSGSETPGTSESATPESSGGSSGGSGKRNYILG
LAIGITSVGYGIIDYETRDVIDAGVRLFKEANVENNEGRRSKRGA
RRLKRRRRHRIQRVKKLLFDYNLLTDHSELSGINPYEARVKGLSQ
KLSEEEFSAALLHLAKRRGVHNVNEVEEDTGNELSTKEQISRNSK
ALEEKYVAELQLERLKKDGEVRGSINRFKTSDYVKEAKQLLKVQK
AYHQLDQSFIDTYIDLLETRRTYYEGPGEGSPFGWKDIKEWYEML
MGHCTYFPEELRSVKYAYNADLYNALNDLNNLVITRDENEKLEYY
EKFQIIENVFKQKKKPTLKQIAKEILVNEEDIKGYRVTSTGKPEF
TNLKVYHDIKDITARKEIIENAELLDQIAKILTIYQSSEDIQEEL
TNLNSELTQEEIEQISNLKGYTGTHNLSLKAINLILDELWHTNDN
QIAIFNRLKLVPKKVDLSQQKEIPTTLVDDFILSPVVKRSFIQSI
KVINAIIKKYGLPNDIIIELAREKNSKDAQKMINEMQKRNRQTNE
RIEEIIRTTGKENAKYLIEKIKLHDMQEGKCLYSLEAIPLEDLLN
NPFNYEVDHIIPRSVSFDNSFNNKVLVKQEENSKKGNRTPFQYLS
SSDSKISYETFKKHILNLAKGKGRISKTKKEYLLEERDINRFSVQ
KDFINRNLVDTRYATRGLMNLLRSYFRVNNLDVKVKSINGGFTSF
LRRKWKFKKERNKGYKHHAEDALIIANADFIFKEWKKLDKAKKVM
ENQMFEEKQAESMPEIETEQEYKEIFITPHQIKHIKDFKDYKYSH
RVDKKPNRELINDTLYSTRKDDKGNTLIVNNLNGLYDKDNDKLKK
LINKSPEKLLMYHHDPQTYQKLKLIMEQYGDEKNPLYKYYEETGN
YLTKYSKKDNGPVIKKIKYYGNKLNAHLDITDDYPNSRNKVVKLS
LKPYRFDVYLDNGVYKFVTVKNLDVIKKENYYEVNSKCYEEAKKL
KKISNQAEFIASFYNNDLIKINGELYRVIGVNNDLLNRIEVNMID
ITYREYLENMNDKRPPRIIKTIASKTQSIKKYSTDILGNLYEVKS
KKHPQI
IKKGSGGSKRTADGSEFEPKKKRKV
SaKKH-ABESe-dimer
(SEQ ID NO: 215)
MKRTADGSEFESPKKKRKVSEVEFSHEYWMRHALTLAKRAWDERE
VPVGAVLVHNNRVIGEGWNRPIGRHDPTAHAEIMALRQGGLVMQN
YRLIDATLYVTLEPCVMCAGAMIHSRIGRVVFGARDAKTGAAGSL
MDVLHHPGMNHRVEITEGILADECAALLSDFFRMRRQEIKAQKKA
QSSTDSGGSSGGSSGSETPGTSESATPESSGGSSGGSSEVEFSHE
YWMRHALTLAKRARDEREVPVGAVLVLNNRVIGEGWNRAIGLHDP
TAHAEIMALRQGGLVMQNYRLIDATLYVTFEPCVMCAGAMIHSRI
GRVVFGVRNSKRGAAGSLMNVLNYPGMNHRVEITEGILADECAAL
LCDFYRMPRQVFNAQKKAQSSINSGGSSGGSSGSETPGTSESATP
ESSGGSSGGSGKRNYILGLAIGITSVGYGIIDYETRDVIDAGVRL
FKEANVENNEGRRSKRGARRLKRRRRHRIQRVKKLLFDYNLLTDH
SELSGINPYEARVKGLSQKLSEEEFSAALLHLAKRRGVHNVNEVE
EDTGNELSTKEQISRNSKALEEKYVAELQLERLKKDGEVRGSINR
FKTSDYVKEAKQLLKVQKAYHQLDQSFIDTYIDLLETRRTYYEGP
GEGSPFGWKDIKEWYEMLMGHCTYFPEELRSVKYAYNADLYNALN
DLNNLVITRDENEKLEYYEKFQIIENVFKQKKKPTLKQIAKEILV
NEEDIKGYRVTSTGKPEFTNLKVYHDIKDITARKEIIENAELLDQ
IAKILTIYQSSEDIQEELTNLNSELTQEEIEQISNLKGYTGTHNL
SLKAINLILDELWHTNDNQIAIFNRLKLVPKKVDLSQQKEIPTTL
VDDFILSPVVKRSFIQSIKVINAIIKKYGLPNDIIIELAREKNSK
DAQKMINEMQKRNRQTNERIEEIIRTTGKENAKYLIEKIKLHDMQ
EGKCLYSLEAIPLEDLLNNPFNYEVDHIIPRSVSFDNSFNNKVLV
KQEENSKKGNRTPFQYLSSSDSKISYETFKKHILNLAKGKGRISK
TKKEYLLEERDINRFSVQKDFINRNLVDTRYATRGLMNLLRSYFR
VNNLDVKVKSINGGFTSFLRRKWKFKKERNKGYKHHAEDALIIAN
ADFIFKEWKKLDKAKKVMENQMFEEKQAESMPEIETEQEYKEIFI
TPHQIKHIKDFKDYKYSHRVDKKPNRELINDTLYSTRKDDKGNTL
IVNNLNGLYDKDNDKLKKLINKSPEKLLMYHHDPQTYQKLKLIME
QYGDEKNPLYKYYEETGNYLTKYSKKDNGPVIKKIKYYGNKLNAH
LDITDDYPNSRNKVVKLSLKPYRFDVYLDNGVYKFVTVKNLDVIK
KENYYEVNSKCYEEAKKLKKISNQAEFIASFYNNDLIKINGELYR
VIGVNNDLLNRIEVNMIDITYREYLENMNDKRPPRIIKTIASKTQ
SIKKYSTDILGNLYEVKSKKHPQIIKKGSGGSKRTADGSEFEPKK
KRKV
CP1028-ABE8e
(SEQ ID NO: 216)
MKRTADGSEFESPKKKRKVSEVEFSHEYWMRHALTLAKRARDERE
VPVGAVLVLNNRVIGEGWNRAIGLHDPTAHAEIMALRQGGLVMQN
YRLIDATLYVTFEPCVMCAGAMIHSRIGRVVFGVRNSKRGAAGSL
MNVLNYPGMNHRVEITEGILADECAALLCDFYRMPRQVFNAQKKA
QSSINSGGSSGGSSGSETPGTSESATPESSGGSSGGSEIGKATAK
YFFYSNIMNFFKTEITLANGEIRKRPLIETNGETGEIVWDKGRDF
ATVRKVLSMPQVNIVKKTEVQTGGFSKESILPKRNSDKLIARKKD
WDPKKYGGFDSPTVAYSVLVVAKVEKGKSKKLKSVKELLGITIME
RSSFEKNPIDFLEAKGYKEVKKDLIIKLPKYSLFELENGRKRMLA
SAGELQKGNELALPSKYVNFLYLASHYEKLKGSPEDNEQKQLFVE
QHKHYLDEIIEQISEFSKRVILADANLDKVLSAYNKHRDKPIREQ
AENIIHLFTLTNLGAPAAFKYFDTTIDRKRYTSTKEVLDATLIHQ
SITGLYETRIDLSQLGGDGGSGGSGGSGGSGGSGGSGGMDKKYSI
GLAIGTNSVGWAVITDEYKVPSKKFKVLGNTDRHSIKKNLIGALL
FDSGETAEATRLKRTARRRYTRRKNRICYLQEIFSNEMAKVDDSF
FHRLEESFLVEEDKKHERHPIFGNIVDEVAYHEKYPTIYHLRKKL
VDSTDKADLRLIYLALAHMIKFRGHFLIEGDLNPDNSDVDKLFIQ
LVQTYNQLFEENPINASGVDAKAILSARLSKSRRLENLIAQLPGE
KKNGLFGNLIALSLGLTPNFKSNFDLAEDAKLQLSKDTYDDDLDN
LLAQIGDQYADLFLAAKNLSDAILLSDILRVNTEITKAPLSASMI
KRYDEHHQDLTLLKALVRQQLPEKYKEIFFDQSKNGYAGYIDGGA
SQEEFYKFIKPILEKMDGTEELLVKLNREDLLRKQRTFDNGSIPH
QIHLGELHAILRRQEDFYPFLKDNREKIEKILTFRIPYYVGPLAR
GNSRFAWMTRKSEETITPWNFEEVVDKGASAQSFIERMTNFDKNL
PNEKVLPKHSLLYEYFTVYNELTKVKYVTEGMRKPAFLSGEQKKA
IVDLLFKTNRKVTVKQLKEDYFKKIECFDSVEISGVEDRFNASLG
TYHDLLKIIKDKDFLDNEENEDILEDIVLTLTLFEDREMIEERLK
TYAHLFDDKVMKQLKRRRYTGWGRLSRKLINGIRDKQSGKTILDF
LKSDGFANRNFMQLIHDDSLTFKEDIQKAQVSGQGDSLHEHIANL
AGSPAIKKGILQTVKVVDELVKVMGRHKPENIVIEMARENQTTQK
GQKNSRERMKRIEEGIKELGSQILKEHPVENTQLQNEKLYLYYLQ
NGRDMYVDQELDINRLSDYDVDHIVPQSFLKDDSIDNKVLTRSDK
NRGKSDNVPSEEVVKKMKNYWRQLLNAKLITQRKFDNLTKAERGG
LSELDKAGFIKRQLVETRQITKHVAQILDSRMNTKYDENDKLIRE
VKVITLKSKLVSDFRKDFQFYKVREINNYHHAHDAYLNAVVGTAL
IKKYPKLESEFVYGDYKVYDVRKMIAKSEQ
SGGSKRTADGSEFEPKKKRKV
CP1028-ABE8e-dimer
(SEQ ID NO: 217)
MKRTADGSEFESPKKKRKVSEVEFSHEYWMRHALTLAKRAWDERE
VPVGAVLVHNNRVIGEGWNRPIGRHDPTAHAEIMALRQGGLVMQN
YRLIDATLYVTLEPCVMCAGAMIHSRIGRVVFGARDAKTGAAGSL
MDVLHHPGMNHRVEITEGILADECAALLSDFFRMRRQEIKAQKKA
QSSTDSGGSSGGSSGSETPGTSESATPESSGGSSGGSSEVEFSHE
YWMRHALTLAKRARDEREVPVGAVLVLNNRVIGEGWNRAIGLHDP
TAHAEIMALRQGGLVMQNYRLIDATLYVTFEPCVMCAGAMIHSRI
GRVVFGVRNSKRGAAGSLMNVLNYPGMNHRVEITEGILADECAAL
LCDFYRMPRQVFNAQKKAQSSINSGGSSGGSSGSETPGTSESATP
ESSGGSSGGSEIGKATAKYFFYSNIMNFFKTEITLANGEIRKRPL
IETNGETGEIVWDKGRDFATVRKVLSMPQVNIVKKTEVQTGGFSK
ESILPKRNSDKLIARKKDWDPKKYGGFDSPTVAYSVLVVAKVEKG
KSKKLKSVKELLGITIMERSSFEKNPIDFLEAKGYKEVKKDLIIK
LPKYSLFELENGRKRMLASAGELQKGNELALPSKYVNFLYLASHY
EKLKGSPEDNEQKQLFVEQHKHYLDEIIEQISEFSKRVILADANL
DKVLSAYNKHRDKPIREQAENIIHLFTLTNLGAPAAFKYFDTTID
RKRYTSTKEVLDATLIHQSITGLYETRIDLSQLGGDGGSGGSGGS
GGSGGSGGSGGMDKKYSIGLAIGTNSVGWAVITDEYKVPSKKFKV
LGNTDRHSIKKNLIGALLFDSGETAEATRLKRTARRRYTRRKNRI
CYLQEIFSNEMAKVDDSFFHRLEESFLVEEDKKHERHPIFGNIVD
EVAYHEKYPTIYHLRKKLVDSTDKADLRLIYLALAHMIKFRGHFL
IEGDLNPDNSDVDKLFIQLVQTYNQLFEENPINASGVDAKAILSA
RLSKSRRLENLIAQLPGEKKNGLFGNLIALSLGLTPNFKSNFDLA
EDAKLQLSKDTYDDDLDNLLAQIGDQYADLFLAAKNLSDAILLSD
ILRVNTEITKAPLSASMIKRYDEHHQDLTLLKALVRQQLPEKYKE
IFFDQSKNGYAGYIDGGASQEEFYKFIKPILEKMDGTEELLVKLN
REDLLRKQRTFDNGSIPHQIHLGELHAILRRQEDFYPFLKDNREK
IEKILTFRIPYYVGPLARGNSRFAWMTRKSEETITPWNFEEVVDK
GASAQSFIERMTNFDKNLPNEKVLPKHSLLYEYFTVYNELTKVKY
VTEGMRKPAFLSGEQKKAIVDLLFKTNRKVTVKQLKEDYFKKIEC
FDSVEISGVEDRFNASLGTYHDLLKIIKDKDFLDNEENEDILEDI
VLTLTLFEDREMIEERLKTYAHLFDDKVMKQLKRRRYTGWGRLSR
KLINGIRDKQSGKTILDFLKSDGFANRNFMQLIHDDSLTFKEDIQ
KAQVSGQGDSLHEHIANLAGSPAIKKGILQTVKVVDELVKVMGRH
KPENIVIEMARENQTTQKGQKNSRERMKRIEEGIKELGSQILKEH
PVENTQLQNEKLYLYYLQNGRDMYVDQELDINRLSDYDVDHIVPQ
SFLKDDSIDNKVLTRSDKNRGKSDNVPSEEVVKKMKNYWRQLLNA
KLITQRKFDNLTKAERGGLSELDKAGFIKRQLVETRQITKHVAQI
LDSRMNTKYDENDKLIREVKVITLKSKLVSDFRKDFQFYKVREIN
NYHHAHDAYLNAVVGTALIKKYPKLESEFVYGDYKVYDVRKMIAK
SEQSGGSKRTADGSEFEPKKKRKV
CP1041-ABE8e
(SEQ ID NO: 218)
MKRTADGSEFESPKKKRKVSEVEFSHEYWMRHALTLAKRARDERE
VPVGAVLVLNNRVIGEGWNRAIGLHDPTAHAEIMALRQGGLVMQN
YRLIDATLYVTFEPCVMCAGAMIHSRIGRVVFGVRNSKRGAAGSL
MNVLNYPGMNHRVEITEGILADECAALLCDFYRMPRQVFNAQKKA
QSSINSGGSSGGSSGSETPGTSESATPESSGGSSGGSNIMNFFKT
EITLANGEIRKRPLIETNGETGEIVWDKGRDFATVRKVLSMPQVN
IVKKTEVQTGGFSKESILPKRNSDKLIARKKDWDPKKYGGFDSPT
VAYSVLVVAKVEKGKSKKLKSVKELLGITIMERSSFEKNPIDFLE
AKGYKEVKKDLIIKLPKYSLFELENGRKRMLASAGELQKGNELAL
PSKYVNFLYLASHYEKLKGSPEDNEQKQLFVEQHKHYLDEIIEQI
SEFSKRVILADANLDKVLSAYNKHRDKPIREQAENIIHLFTLTNL
GAPAAFKYFDTTIDRKRYTSTKEVLDATLIHQSITGLYETRIDLS
QLGGDGGSGGSGGSGGSGGSGGSGGDKKYSIGLAIGTNSVGWAVI
TDEYKVPSKKFKVLGNTDRHSIKKNLIGALLFDSGETAEATRLKR
TARRRYTRRKNRICYLQEIFSNEMAKVDDSFFHRLEESFLVEEDK
KHERHPIFGNIVDEVAYHEKYPTIYHLRKKLVDSTDKADLRLIYL
ALAHMIKFRGHFLIEGDLNPDNSDVDKLFIQLVQTYNQLFEENPI
NASGVDAKAILSARLSKSRRLENLIAQLPGEKKNGLFGNLIALSL
GLTPNFKSNFDLAEDAKLQLSKDTYDDDLDNLLAQIGDQYADLFL
AAKNLSDAILLSDILRVNTEITKAPLSASMIKRYDEHHQDLTLLK
ALVRQQLPEKYKEIFFDQSKNGYAGYIDGGASQEEFYKFIKPILE
KMDGTEELLVKLNREDLLRKQRTFDNGSIPHQIHLGELHAILRRQ
EDFYPFLKDNREKIEKILTFRIPYYVGPLARGNSRFAWMTRKSEE
TITPWNFEEVVDKGASAQSFIERMTNFDKNLPNEKVLPKHSLLYE
YFTVYNELTKVKYVTEGMRKPAFLSGEQKKAIVDLLFKTNRKVTV
KQLKEDYFKKIECFDSVEISGVEDRFNASLGTYHDLLKIIKDKDF
LDNEENEDILEDIVLTLTLFEDREMIEERLKTYAHLFDDKVMKQL
KRRRYTGWGRLSRKLINGIRDKQSGKTILDFLKSDGFANRNFMQL
IHDDSLTFKEDIQKAQVSGQGDSLHEHIANLAGSPAIKKGILQTV
KVVDELVKVMGRHKPENIVIEMARENQTTQKGQKNSRERMKRIEE
GIKELGSQILKEHPVENTQLQNEKLYLYYLQNGRDMYVDQELDIN
RLSDYDVDHIVPQSFLKDDSIDNKVLTRSDKNRGKSDNVPSEEVV
KKMKNYWRQLLNAKLITQRKFDNLTKAERGGLSELDKAGFIKRQL
VETRQITKHVAQILDSRMNTKYDENDKLIREVKVITLKSKLVSDF
RKDFQFYKVREINNYHHAHDAYLNAVVGTALIKKYPKLESEFVYG
DYKVYDVRKMIAKSEQEIGKATAKYFFYS
SGGSKRTADGSEFEPKKKRKV
ABE8e (TadA-8e V82G)
(SEQ ID NO: 219)
MKRTADGSEFESPKKKRKVSEVEFSHEYWMRHALTLAKRARDERE
VPVGAVLVLNNRVIGEGWNRAIGLHDPTAHAEIMALRQGGLVMQN
YRLIDATLYVTFEPCVMCAGAMIHSRIGRVVFGVRNSKRGAAGSL
MNVLNYPGMNHRVEITEGILADECAALLCDFYRMPRQVFNAQKKA
QSSINSGGSSGGSSGSETPGTSESATPESSGGSSGGSDKKYSIGL
AIGTNSVGWAVITDEYKVPSKKFKVLGNTDRHSIKKNLIGALLFD
SGETAEATRLKRTARRRYTRRKNRICYLQEIFSNEMAKVDDSFFH
RLEESFLVEEDKKHERHPIFGNIVDEVAYHEKYPTIYHLRKKLVD
STDKADLRLIYLALAHMIKFRGHFLIEGDLNPDNSDVDKLFIQLV
QTYNQLFEENPINASGVDAKAILSARLSKSRRLENLIAQLPGEKK
NGLFGNLIALSLGLTPNFKSNFDLAEDAKLQLSKDTYDDDLDNLL
AQIGDQYADLFLAAKNLSDAILLSDILRVNTEITKAPLSASMIKR
YDEHHQDLTLLKALVRQQLPEKYKEIFFDQSKNGYAGYIDGGASQ
EEFYKFIKPILEKMDGTEELLVKLNREDLLRKQRTFDNGSIPHQI
HLGELHAILRRQEDFYPFLKDNREKIEKILTFRIPYYVGPLARGN
SRFAWMTRKSEETITPWNFEEVVDKGASAQSFIERMTNFDKNLPN
EKVLPKHSLLYEYFTVYNELTKVKYVTEGMRKPAFLSGEQKKAIV
DLLFKTNRKVTVKQLKEDYFKKIECFDSVEISGVEDRFNASLGTY
HDLLKIIKDKDFLDNEENEDILEDIVLTLTLFEDREMIEERLKTY
AHLFDDKVMKQLKRRRYTGWGRLSRKLINGIRDKQSGKTILDFLK
SDGFANRNFMQLIHDDSLTFKEDIQKAQVSGQGDSLHEHIANLAG
SPAIKKGILQTVKVVDELVKVMGRHKPENIVIEMARENQTTQKGQ
KNSRERMKRIEEGIKELGSQILKEHPVENTQLQNEKLYLYYLQNG
RDMYVDQELDINRLSDYDVDHIVPQSFLKDDSIDNKVLTRSDKNR
GKSDNVPSEEVVKKMKNYWRQLLNAKLITQRKFDNLTKAERGGLS
ELDKAGFIKRQLVETRQITKHVAQILDSRMNTKYDENDKLIREVK
VITLKSKLVSDFRKDFQFYKVREINNYHHAHDAYLNAVVGTALIK
KYPKLESEFVYGDYKVYDVRKMIAKSEQEIGKATAKYFFYSNIMN
FFKTEITLANGEIRKRPLIETNGETGEIVWDKGRDFATVRKVLSM
PQVNIVKKTEVQTGGFSKESILPKRNSDKLIARKKDWDPKKYGGF
DSPTVAYSVLVVAKVEKGKSKKLKSVKELLGITIMERSSFEKNPI
DFLEAKGYKEVKKDLIKLPKYSLFELENGRKRMLASAGELQKGNE
LALPSKYVNFLYLASHYEKLKGSPEDNEQKQLFVEQHKHYLDEII
EQISEFSKRVILADANLDKVLSAYNKHRDKPIREQAENIIHLFTL
TNLGAPAAFKYFDTTIDRKRYTSTKEVLDATLIHQSITGLYETRI
DLSQLGGDSGGSKRTADGSEFEPKKKRKV
ABE8e(TadA-8e K20AR21A)
(SEQ ID NO: 220)
MKRTADGSEFESPKKKRKVSEVEFSHEYWMRHALTLAKRARDERE
VPVGAVLVLNNRVIGEGWNRAIGLHDPTAHAEIMALRQGGLVMQN
YRLIDATLYVTFEPCVMCAGAMIHSRIGRVVFGVRNSKRGAAGSL
MNVLNYPGMNHRVEITEGILADECAALLCDFYRMPRQVFNAQKKA
QSSINSGGSSGGSSGSETPGTSESATPESSGGSSGGSDKKYSIGL
AIGTNSVGWAVITDEYKVPSKKFKVLGNTDRHSIKKNLIGALLFD
SGETAEATRLKRTARRRYTRRKNRICYLQEIFSNEMAKVDDSFFH
RLEESFLVEEDKKHERHPIFGNIVDEVAYHEKYPTIYHLRKKLVD
STDKADLRLIYLALAHMIKFRGHFLIEGDLNPDNSDVDKLFIQLV
QTYNQLFEENPINASGVDAKAILSARLSKSRRLENLIAQLPGEKK
NGLFGNLIALSLGLTPNFKSNFDLAEDAKLQLSKDTYDDDLDNLL
AQIGDQYADLFLAAKNLSDAILLSDILRVNTEITKAPLSASMIKR
YDEHHQDLTLLKALVRQQLPEKYKEIFFDQSKNGYAGYIDGGASQ
EEFYKFIKPILEKMDGTEELLVKLNREDLLRKQRTFDNGSIPHQI
HLGELHAILRRQEDFYPFLKDNREKIEKILTFRIPYYVGPLARGN
SRFAWMTRKSEETITPWNFEEVVDKGASAQSFIERMTNFDKNLPN
EKVLPKHSLLYEYFTVYNELTKVKYVTEGMRKPAFLSGEQKKAIV
DLLFKTNRKVTVKQLKEDYFKKIECFDSVEISGVEDRFNASLGTY
HDLLKIIKDKDFLDNEENEDILEDIVLTLTLFEDREMIEERLKTY
AHLFDDKVMKQLKRRRYTGWGRLSRKLINGIRDKQSGKTILDFLK
SDGFANRNFMQLIHDDSLTFKEDIQKAQVSGQGDSLHEHIANLAG
SPAIKKGILQTVKVVDELVKVMGRHKPENIVIEMARENQTTQKGQ
KNSRERMKRIEEGIKELGSQILKEHPVENTQLQNEKLYLYYLQNG
RDMYVDQELDINRLSDYDVDHIVPQSFLKDDSIDNKVLTRSDKNR
GKSDNVPSEEVVKKMKNYWRQLLNAKLITQRKFDNLTKAERGGLS
ELDKAGFIKRQLVETRQITKHVAQILDSRMNTKYDENDKLIREVK
VITLKSKLVSDFRKDFQFYKVREINNYHHAHDAYLNAVVGTALIK
KYPKLESEFVYGDYKVYDVRKMIAKSEQEIGKATAKYFFYSNIMN
FFKTEITLANGEIRKRPLIETNGETGEIVWDKGRDFATVRKVLSM
PQVNIVKKTEVQTGGFSKESILPKRNSDKLIARKKDWDPKKYGGF
DSPTVAYSVLVVAKVEKGKSKKLKSVKELLGITIMERSSFEKNPI
DFLEAKGYKEVKKDLIIKLPKYSLFELENGRKRMLASAGELQKGN
ELALPSKYVNFLYLASHYEKLKGSPEDNEQKQLFVEQHKHYLDEI
IEQISEFSKRVILADANLDKVLSAYNKHRDKPIREQAENIIHLFT
LTNLGAPAAFKYFDTTIDRKRYTSTKEVLDATLIHQSITGLYETR
IDLSQLGGDSGGSKRTADGSEFEPKKKRKV
ABE8e(TadA-8e V106W)
(SEQ ID NO: 3239)
MKRTADGSEFESPKKKRKVSEVEFSHEYWMRHALTLAKRARDERE
VPVGAVLVLNNRVIGEGWNRAIGLHDPTAHAEIMALRQGGLVMQN
YRLIDATLYVTFEPCVMCAGAMIHSRIGRVVFGWRNSKRGAAGSL
MNVLNYPGMNHRVEITEGILADECAALLCDFYRMPRQVFNAQKKA
QSSINSGGSSGGSSGSETPGTSESATPESSGGSSGGSDKKYSIGL
AIGTNSVGWAVITDEYKVPSKKFKVLGNTDRHSIKKNLIGALLFD
SGETAEATRLKRTARRRYTRRKNRICYLQEIFSNEMAKVDDSFFH
RLEESFLVEEDKKHERHPIFGNIVDEVAYHEKYPTIYHLRKKLVD
STDKADLRLIYLALAHMIKFRGHFLIEGDLNPDNSDVDKLFIQLV
QTYNQLFEENPINASGVDAKAILSARLSKSRRLENLIAQLPGEKK
NGLFGNLIALSLGLTPNFKSNFDLAEDAKLQLSKDTYDDDLDNLL
AQIGDQYADLFLAAKNLSDAILLSDILRVNTEITKAPLSASMIKR
YDEHHQDLTLLKALVRQQLPEKYKEIFFDQSKNGYAGYIDGGASQ
EEFYKFIKPILEKMDGTEELLVKLNREDLLRKQRTFDNGSIPHQI
HLGELHAILRRQEDFYPFLKDNREKIEKILTFRIPYYVGPLARGN
SRFAWMTRKSEETITPWNFEEVVDKGASAQSFIERMTNFDKNLPN
EKVLPKHSLLYEYFTVYNELTKVKYVTEGMRKPAFLSGEQKKAIV
DLLFKTNRKVTVKQLKEDYFKKIECFDSVEISGVEDRFNASLGTY
HDLLKIIKDKDFLDNEENEDILEDIVLTLTLFEDREMIEERLKTY
AHLFDDKVMKQLKRRRYTGWGRLSRKLINGIRDKQSGKTILDFLK
SDGFANRNFMQLIHDDSLTFKEDIQKAQVSGQGDSLHEHIANLAG
SPAIKKGILQTVKVVDELVKVMGRHKPENIVIEMARENQTTQKGQ
KNSRERMKRIEEGIKELGSQILKEHPVENTQLQNEKLYLYYLQNG
RDMYVDQELDINRLSDYDVDHIVPQSFLKDDSIDNKVLTRSDKNR
GKSDNVPSEEVVKKMKNYWRQLLNAKLITQRKFDNLTKAERGGLS
ELDKAGFIKRQLVETRQITKHVAQILDSRMNTKYDENDKLIREVK
VITLKSKLVSDFRKDFQFYKVREINNYHHAHDAYLNAVVGTALIK
KYPKLESEFVYGDYKVYDVRKMIAKSEQEIGKATAKYFFYSNIMN
FFKTEITLANGEIRKRPLIETNGETGEIVWDKGRDFATVRKVLSM
PQVNIVKKTEVQTGGFSKESILPKRNSDKLIARKKDWDPKKYGGF
DSPTVAYSVLVVAKVEKGKSKKLKSVKELLGITIMERSSFEKNPI
DFLEAKGYKEVKKDLIIKLPKYSLFELENGRKRMLASAGELQKGN
ELALPSKYVNFLYLASHYEKLKGSPEDNEQKQLFVEQHKHYLDEI
IEQISEFSKRVILADANLDKVLSAYNKHRDKPIREQAENIIHLFT
LTNLGAPAAFKYFDTTIDRKRYTSTKEVLDATLIHQSITGLYETR
IDLSQLGGDSGGSKRTADGSEFEPKKKRKV
ABE8e-NRTH dimer editor: NLS, wtTadA,
linker, TadA*, SpCas9-NRTH
(SEQ ID NO: 3240)
MKRTADGSEFESPKKKRKVSEVEFSHEYWMRHALTLAKRAWDERE
VPVGAVLVHNNRVIGEGWNRPIGRHDPTAHAEIMALRQGGLVMQN
YRLIDATLYVTLEPCVMCAGAMIHSRIGRVVFGARDAKTGAAGSL
MDVLHHPGMNHRVEITEGILADECAALLSDFFRMRRQEIKAQKKA
QSSTDSGGSSGGSSGSETPGTSESATPESSGGSSGGSSEVEFSHE
YWMRHALTLAKRARDEREVPVGAVLVLNNRVIGEGWNRAIGLHDP
TAHAEIMALRQGGLVMQNYRLIDATLYVTFEPCVMCAGAMIHSRI
GRWFGVRNSKRGAAGSEMNVLNYPGMNHRVEITEGILADECAALL
CDFYRMPRQVFNAQKKAQSSINSGGSSGGSSGSETPGESESATPE
SSGGSSGGSDKKYSIGLAIGTNSVGWAVITDEYKVPSKKFKVLGN
TDRHSIKKNLIGALLFDSGETAEATRLKRTARRRYTRRKNRICYL
QEIFSNEMAKVDDSFFHRLEESFLVEEDKKHERHPIFGNIVDEVA
YHEKYPTIYHLRKKLVDSTDKADLRLIYLALAHMIKFRGHFLIEG
DLNPDNSDVDKLFIQLVQTYNQLFEENPINASGVDAKAILSARLS
KSRRLENLIAQLPGEKKNGLFGNLIALSLGLTPNFKSNFDLAEDA
KLQLSKDTYDDDLDNLLAQIGDQYADLFLAAKNLSDAILLSDILR
VNTEITKAPLSASMVKRYDEHHQDLTLLKALVRQQLPEKYKEIFF
DQSKNGYAGYIDGGASQEEFYKFIKPILEKMDGTEELLVKLNRED
LLRKQRTFDNGIIPHQIHLGELHAILRRQGDFYPFLKDNREKIEK
ILTFRIPYYVGPLARGNSRFAWMTRKSEETITPWNFEEVVDKGAS
AQSFIERMTNFDKNLPNEKVLPKHSLLYEYFTVYNELTKVKYVTE
GMRKPAFLSGEQKKAIVDLLFKTNRKVTVKQLKEDYFKKIECFDS
VEISGVEDRFNASLGTYHDLLKIIKDKDFLDNEENEDILEDIVLT
LTLFEDREMIEERLKTYAHLFDDKVMKQLKRLRYTGWGRLSRKLI
NGIRDKQSGKTILDFLKSDGFANRNFMQLIHDDSLTFKEDIQKAQ
VSCQGDSLHEHIANLAGSPAIKKGILQTVKWDELIKVMGGHKPEN
IVIEMARENQTTQKGQKNSRERMKRIEEGIKELGSQILKEHPVEN
TQLQNEKLYLYYLQNGRDMYVDQELDINRLSDYDVDHIVPQSFLK
DDSIENKVLTRSDKNRGKSDNVPSEEWKKMKNYWRQLLNAKLITQ
RKFDNLTKAERGGLSELDKAGFIKRQLAETRQITKHVAQILDSRM
NTKYDENDKLIREVKVITLKSKLVSDFRKDFQFYKVREINNYHHA
HDAYLNAWGTALIKKYPKLESEFVYGDYKVYDVRKMIAKSEQEIG
KATAKYFFYSNIMNFFKTEITLANGEIRKRPLIETNGETGEIVWD
KGRDFATVRKVLSMPQVNIVKKTEVQTGGFSKESILPKGNSDKLI
ARKKDWDPKKYGGFNSPTVAYSVLVVAKVEKGKSKKLKSVKELLG
ITIMERSSFEKNPIGFLEAKGYKEVKKDLIIKLPKYSLFELENGR
KRMLASASVLHKGNELALPSKYVNFLYLASHYEKLKGSSEDNKQK
QLFVEQHKHYLDEIIEQISEFSKRVILADANLDKVLSAYNKHRDK
PIREQAENIIHLFTLTNLGASAAFKYFDTTIGRKLYTSTKEVLDA
TLIHQSITGLYETRIDLSQLGGDSGGSKRTADGSEFEPKKKRKV
ABE8e-NRTH monomer editor: NLS, linker,
TadA*, SpCas9-NRTH
(SEQ ID NO: 3241)
MKRTADGSEFESPKKKRKVSEVEFSHEYWMRHALTLAKRARDERE
VPVGAVLVLNNRVIGEGWNRAIGLHDPTAHAEIMALRQGGLVMQN
YRLIDATLYVTFEPCVMCAGAMIHSRIGRVVFGVRNSKRGAAGSL
MNVLNYPGMNHRVEITEGILADECAALLCDFYRMPRQVFNAQKKA
QSSINSGGSSGGSSGSETPGTSESATPESSGGSSGGSDKKYSIGL
AIGTNSVGWAVITDEYKVPSKKFKVLGNTDRHSIKKNLIGALLFD
SGETAEATRLKRTARRRYTRRKNRICYLQEIFSNEMAKVDDSFFH
RLEESFLVEEDKKHERHPIFGNIVDEVAYHEKYPTIYHLRKKLVD
STDKADLRLIYLALAHMIKFRGHFLIEGDLNPDNSDVDKLFIQLV
QTYNQLFEENPINASGVDAKAILSARLSKSRRLENLIAQLPGEKK
NGLFGNLIALSLGLTPNFKSNFDLAEDAKLQLSKDTYDDDLDNLL
AQIGDQYADLFLAAKNLSDAILLSDILRVNTEITKAPLSASMVKR
YDEHHQDLTLLKALVRQQLPEKYKEIFFDQSKNGYAGYIDGGASQ
EEFYKFIKPILEKMDGTEELLVKLNREDLLRKQRTFDNGIIPHQI
HLGELHAILRRQGDFYPFLKDNREKIEKILTFRIPYYVGPLARGN
SRFAWMTRKSEETITPWNFEEVVDKGASAQSFIERMTNFDKNLPN
EKVLPKHSLLYEYFTVYNELTKVKYVTEGMRKPAFLSGEQKKAIV
DLLFKTNRKVTVKQLKEDYFKKIECFDSVEISGVEDRFNASLGTY
HDLLKIIKDKDFLDNEENEDILEDIVLTLTLFEDREMIEERLKTY
AHLFDDKVMKQLKRLRYTGWGRLSRKLINGIRDKQSGKTILDFLK
SDGFANRNFMQLIHDDSLTFKEDIQKAQVSCQGDSLHEHIANLAG
SPAIKKGILQTVKVVDELIKVMGGHKPENIVIEMARENQTTQKGQ
KNSRERMKRIEEGIKELGSQILKEHPVENTQLQNEKLYLYYLQNG
RDMYVDQELDINRLSDYDVDHIVPQSFLKDDSIENKVLTRSDKNR
GKSDNVPSEEVVKKMKNYWRQLLNAKLITQRKFDNLTKAERGGLS
ELDKAGFIKRQLAETRQITKHVAQILDSRMNTKYDENDKLIREVK
VITLKSKLVSDFRKDFQFYKVREINNYHHAHDAYLNAVVGTALIK
KYPKLESEFVYGDYKVYDVRKMIAKSEQEIGKATAKYFFYSNIMN
FFKTEITLANGEIRKRPLIETNGETGEIVWDKGRDFATVRKVLSM
PQVNIVKKTEVQTGGFSKESILPKGNSDKLIARKKDWDPKKYGGF
NSPTVAYSVLVVAKVEKGKSKKLKSVKELLGITIMERSSFEKNPI
GFLEAKGYKEVKKDLIIKLPKYSLFELENGRKRMLASASVLHKGN
ELALPSKYVNFLYLASHYEKLKGSSEDNKQKQLFVEQHKHYLDEI
IEQISEFSKRVILADANLDKVLSAYNKHRDKPIREQAENIIHLFT
LTNLGASAAFKYFDTTIGRKLYTSTKEVLDATLIHQSITGLYETR
IDLSQLGGD
SGGSKRTADGSEFEPKKKRKV
ABE8e-SpyMac dimer editor: NLS, wtTadA,
linker, TadA*, SpCas9-SpyMac
(SEQ ID NO: 3242)
MKRTADGSEFESPKKKRKVSEVEFSHEYWMRHALTLAKRAWDERE
VPVGAVLVHNNRVIGEGWNRPIGRHDPTAHAEIMALRQGGLVMQN
YRLIDATLYVTLEPCVMCAGAMIHSRIGRVVFGARDAKTGAAGSL
MDVLHHPGMNHRVEITEGILADECAALLSDFFRMRRQEIKAQKKA
QSSTDSGGSSGGSSGSETPGTSESATPESSGGSSGGSSEVEFSHE
YWMRHALTLAKRARDEREVPVGAVLVLNNRVIGEGWNRAIGLHDP
TAHAEIMALRQGGLVMQNYRLIDATLYVTFEPCVMCAGAMIHSRI
GRWFGVRNSKRGAAGSEMNVLNYPGMNHRVEITEGILADECAALL
CDFYRMPRQVFNAQKKAQSSINSGGSSGGSSGSETPGESESATPE
SSGGSSGGSDKKYSIGLAIGTNSVGWAVITDEYKVPSKKFKVLGN
TDRHSIKKNLIGALLFDSGETAEATRLKRTARRRYTRRKNRICYL
QEIFSNEMAKVDDSFFHRLEESFLVEEDKKHERHPIFGNIVDEVA
YHEKYPTIYHLRKKLVDSTDKADLRLIYLALAHMIKFRGHFLIEG
DLNPDNSDVDKLFIQLVQTYNQLFEENPINASGVDAKAILSARLS
KSRRLENLIAQLPGEKKNGLFGNLIALSLGLTPNFKSNFDLAEDA
KLQLSKDTYDDDLDNLLAQIGDQYADLFLAAKNLSDAILLSDILR
VNTEITKAPLSASMIKRYDEHHQDLTLLKALVRQQLPEKYKEIFF
DQSKNGYAGYIDGGASQEEFYKFIKPILEKMDGTEELLVKLNRED
LLRKQRTFDNGSIPHQIHLGELHAILRRQEDFYPFLKDNREKIEK
ILTFRIPYYVGPLARGNSRFAWMTRKSEETITPWNFEEVVDKGAS
AQSFIERMTNFDKNLPNEKVLPKHSLLYEYFTVYNELTKVKYVTE
GMRKPAFLSGEQKKAIVDLLFKTNRKVTVKQLKEDYFKKIECFDS
VEISGVEDRFNASLGTYHDLLKIIKDKDFLDNEENEDILEDIVLT
LTLFEDREMIEERLKTYAHLFDDKVMKQLKRRRYTGWGRLSRKLI
NGIRDKQSGKTILDFLKSDGFANRNFMQLIHDDSLTFKEDIQKAQ
VSGQGDSLHEHIANLAGSPAIKKGILQTVKWDELVKVMGRHKPEN
IVIEMARENQTTQKGQKNSRERMKRIEEGIKELGSQILKEHPVEN
TQLQNEKLYLYYLQNGRDMYVDQELDINRLSDYDVDHIVPQSFLK
DDSIDNKVLTRSDKNRGKSDNVPSEEWKKMKNYWRQLLNAKLITQ
RKFDNLTKAERGGLSELDKAGFIKRQLVETRQITKHVAQILDSRM
NTKYDENDKLIREVKVITLKSKLVSDFRKDFQFYKVREINNYHHA
HDAYLNAWGTALIKKYPKLESEFVYGDYKVYDVRKMIAKSEQEIG
KATAKYFFYSNIMNFFKTEITLANGEIRKRPLIETNGETGEIVWD
KGRDFATVRKVLSMPQVNIVKKTEIQTVGQNGGLFDDNPKSPLEV
TPSKLVPLKKELNPKKYGGYQKPTTAYPVLLITDTKQLIPISVMN
KKQFEQNPVKFLRDRGYQQVGKNDFIKLPKYTLVDIGDGIKRLWA
SSKEIHKGNQLWSKKSQILLYHAHHLDSDLSNDYLQNHNQQFDVL
FNEIISFSKKCKLGKEHIQKIENVYSNKKNSASIEELAESFIKLL
GFTQLGATSPFNFLGVKLNQKQYKGKKDYILPCTEGTLIRQSITG
LYETRVDLSKIGEDSGGSKETNDGSEEEEKKKRKV
ABE8e-SpyMac monomer editor: NLS, wtTadA,
linker, TadA*, SpCas9-SpyMac
(SEQ ID NO: 3243)
MKRTADGSEFESPKKKRKVSEVEFSHEYWMRHALTLAKRARDERE
VPVGAVLVLNNRVIGEGWNRAIGLHDPTAHAEIMALRQGGLVMQN
YRLIDATLYVTFEPCVMCAGAMIHSRIGRVVFGVRNSKRGAAGSL
MNVLNYPGMNHRVEITEGILADECAALLCDFYRMPRQVFNAQKKA
QSSINSGGSSGGSSGSETPGTSESATPESSGGSSGGSDKKYSIGL
AIGTNSVGWAVITDEYKVPSKKFKVLGNTDRHSIKKNLIGALLFD
SGETAEATRLKRTARRRYTRRKNRICYLQEIFSNEMAKVDDSFFH
RLEESFLVEEDKKHERHPIFGNIVDEVAYHEKYPTIYHLRKKLVD
STDKADLRLIYLALAHMIKFRGHFLIEGDLNPDNSDVDKLFIQLV
QTYNQLFEENPINASGVDAKAILSARLSKSRRLENLIAQLPGEKK
NGLFGNLIALSLGLTPNFKSNFDLAEDAKLQLSKDTYDDDLDNLL
AQIGDQYADLFLAAKNLSDAILLSDILRVNTEITKAPLSASMIKR
YDEHHQDLTLLKALVRQQLPEKYKEIFFDQSKNGYAGYIDGGASQ
EEFYKFIKPILEKMDGTEELLVKLNREDLLRKQRTFDNGSIPHQI
HLGELHAILRRQEDFYPFLKDNREKIEKILTFRIPYYVGPLARGN
SRFAWMTRKSEETITPWNFEEVVDKGASAQSFIERMTNFDKNLPN
EKVLPKHSLLYEYFTVYNELTKVKYVTEGMRKPAFLSGEQKKAIV
DLLFKTNRKVTVKQLKEDYFKKIECFDSVEISGVEDRFNASLGTY
HDLLKIIKDKDFLDNEENEDILEDIVLTLTLFEDREMIEERLKTY
AHLFDDKVMKQLKRRRYTGWGRLSRKLINGIRDKQSGKTILDFLK
SDGFANRNFMQLIHDDSLTFKEDIQKAQVSGQGDSLHEHIANLAG
SPAIKKGILQTVKVVDELVKVMGRHKPENIVIEMARENQTTQKGQ
KNSRERMKRIEEGIKELGSQILKEHPVENTQLQNEKLYLYYLQNG
RDMYVDQELDINRLSDYDVDHIVPQSFLKDDSIDNKVLTRSDKNR
GKSDNVPSEEVVKKMKNYWRQLLNAKLITQRKFDNLTKAERGGLS
ELDKAGFIKRQLVETRQITKHVAQILDSRMNTKYDENDKLIREVK
VITLKSKLVSDFRKDFQFYKVREINNYHHAHDAYLNAVVGTALIK
KYPKLESEFVYGDYKVYDVRKMIAKSEQEIGKATAKYFFYSNIMN
FFKTEITLANGEIRKRPLIETNGETGEIVWDKGRDFATVRKVLSM
PQVNIVKKTEIQTVGQNGGLFDDNPKSPLEVTPSKLVPLKKELNP
KKYGGYQKPTTAYPVLLITDTKQLIPISVMNKKQFEQNPVKFLRD
RGYQQVGKNDFIKLPKYTLVDIGDGIKRLWASSKEIHKGNQLVVS
KKSQILLYHAHHLDSDLSNDYLQNHNQQFDVLFNEIISFSKKCKL
GKEHIQKIENVYSNKKNSASIEELAESFIKLLGFTQLGATSPFNF
LGVKLNQKQYKGKKDYILPCTEGTLIRQSITGLYETRVDLSKIGE
DSGGSKRTADGSEFEPKKKRKV
ABE8e-VRQR-CP1041 dimer: NLS, wtTadA,
linker, TadA*, SpCas9-VRQR-
CP1041
(SEQ ID NO: 3244)
MKRTADGSEFESPKKKRKVSEVEFSHEYWMRHALTLAKRAWDERE
VPVGAVLVHNNRVIGEGWNRPIGRHDPTAHAEIMALRQGGLVMQN
YRLIDATLYVTLEPCVMCAGAMIHSRIGRVVFGARDAKTGAAGSL
MDVLHHPGMNHRVEITEGILADECAALLSDFFRMRRQEIKAQKKA
QSSTDSGGSSGGSSGSETPGTSESATPESSGGSSGGSSEVEFSHE
YWMRHALTLAKRARDEREVPVGAVLVLNNRVIGEGWNRAIGLHDP
TAHAEIMALRQGGLVMQNYRLIDATLYVTFEPCVMCAGAMIHSRI
GRWFGVRNSKRGAAGSEMNVLNYPGMNHRVEITEGILADECAALL
CDFYRMPRQVFNAQKKAQSSINSGGSSGGSSGSETPGTSESATPE
SSGGSSGGSNIMNFFKTEITLANGEIRKRPLIETNGETGEIVWDK
GRDFATVRKVLSMPQVNIVKKTEVQTGGFSKESIRPKRNSDKLIA
RKKDWDPKKYGGFVSPTVAYSVLVVAKVEKGKSKKLKSVKELLGI
TIMERSSFEKNPIDFLEAKGYKEVKKDLIIKLPKYSLFELENGRK
RMLASARFLQKGNELALPSKYVNFLYLASHYEKLKGSPEDNEQKQ
LFVEQHKHYLDEIIEQISEFSKRVILADANLDKVLSAYNKHRDKP
IREQAENIIHLFTLTNLGAPRAFKYFDTTIDRKVYRSTKEVLDAT
LIHQSITGLYETRIDLSQLGGDGGSGGSGGSGGSGGSGGSGGDKK
YSIGLAIGTNSVGWAVITDEYKVPSKKFKVLGNTDRHSIKKNLIG
ALLFDSGETAEATRLKRTARRRYTRRKNRICYLQEIFSNEMAKVD
DSFFHRLEESFLVEEDKKHERHPIFGNIVDEVAYHEKYPTIYHLR
KKLVDSTDKADLRLIYLALAHMIKFRGHFLIEGDLNPDNSDVDKL
FIQLVQTYNQLFEENPINASGVDAKAILSARLSKSRRLENLIAQL
PGEKKNGLFGNLIALSLGLTPNFKSNFDLAEDAKLQLSKDTYDDD
LDNLLAQIGDQYADLFLAAKNLSDAILLSDILRVNTEITKAPLSA
SMIKRYDEHHQDLTLLKALVRQQLPEKYKEIFFDQSKNGYAGYID
GGASQEEFYKFIKPILEKMDGTEELLVKLNREDLLRKQRTFDNGS
IPHQIHLGELHAILRRQEDFYPFLKDNREKIEKILTFRIPYYVGP
LARGNSRFAWMTRKSEETITPWNFEEVVDKGASAQSFIERMTNFD
KNLPNEKVLPKHSLLYEYFTVYNELTKVKYVTEGMRKPAFLSGEQ
KKAIVDLLFKTNRKVTVKQLKEDYFKKIECFDSVEISGVEDRFNA
SLGTYHDLLKIIKDKDFLDNEENEDILEDIVLTLTLFEDREMIEE
RLKTYAHLFDDKVMKQLKRRRYTGWGRLSRKLINGIRDKQSGKTI
LDFLKSDGFANRNFMQLIHDDSLTFKEDIQKAQVSGQGDSLHEHI
ANLAGSPAIKKGILQTVKWDELVKVMGRHKPENIVIEMARENQTT
QKGQKNSRERMKRIEEGIKELGSQILKEHPVENTQLQNEKLYLYY
LQNGRDMYVDQELDINRLSDYDVDHIVPQSFLKDDSIDNKVLTRS
DKNRGKSDNVPSEEWKKMKNYWRQLLNAKLITQRKFDNLTKAERG
GLSELDKAGFIKRQLVETRQITKHVAQILDSRMNTKYDENDKLIR
EVKVITLKSKLVSDFRKDFQFYKVREINNYHHAHDAYLNAWGTAL
IKKYPKLESEFVYGDYKVYDVRKMIAKSEQEIGKATAKYFFYSSG
GSKSRTADGSEFEPKKKRKV
ABE8e-VRQR-CP1041 monomer: NLS, linker,
TadA*, SpCas9-VRQR-CP1041
(SEQ ID NO: 3245)
MKRTADGSEFESPKKKRKVSEVEFSHEYWMRHALTLAKRARDERE
VPVGAVLVLNNRVIGEGWNRAIGLHDPTAHAEIMALRQGGLVMQN
YRLIDATLYVTFEPCVMCAGAMIHSRIGRVVFGVRNSKRGAAGSL
MNVLNYPGMNHRVEITEGILADECAALLCDFYRMPRQVFNAQKKA
QSSINSGGSSGGSSGSETPGTSESATPESSGGSSGGSNIMNFFKT
EITLANGEIRKRPLIETNGETGEIVWDKGRDFATVRKVLSMPQVN
IVKKTEVQTGGFSKESIRPKRNSDKLIARKKDWDPKKYGGFVSPT
VAYSVLVVAKVEKGKSKKLKSVKELLGITIMERSSFEKNPIDFLE
AKGYKEVKKDLIIKLPKYSLFELENGRKRMLASARFLQKGNELAL
PSKYVNFLYLASHYEKLKGSPEDNEQKQLFVEQHKHYLDEIIEQI
SEFSKRVILADANLDKVLSAYNKHRDKPIREQAENIIHLFTLTNL
GAPRAFKYFDTTIDRKVYRSTKEVLDATLIHQSITGLYETRIDLS
QLGGDGGSGGSGGSGGSGGSGGSGGDKKYSIGLAIGTNSVGWAVI
TDEYKVPSKKFKVLGNTDRHSIKKNLIGALLFDSGETAEATRLKR
TARRRYTRRKNRICYLQEIFSNEMAKVDDSFFHRLEESFLVEEDK
KHERHPIFGNIVDEVAYHEKYPTIYHLRKKLVDSTDKADLRLIYL
ALAHMIKFRGHFLIEGDLNPDNSDVDKLFIQLVQTYNQLFEENPI
NASGVDAKAILSARLSKSRRLENLIAQLPGEKKNGLFGNLIALSL
GLTPNFKSNFDLAEDAKLQLSKDTYDDDLDNLLAQIGDQYADLFL
AAKNLSDAILLSDILRVNTEITKAPLSASMIKRYDEHHQDLTLLK
ALVRQQLPEKYKEIFFDQSKNGYAGYIDGGASQEEFYKFIKPILE
KMDGTEELLVKLNREDLLRKQRTFDNGSIPHQIHLGELHAILRRQ
EDFYPFLKDNREKIEKILTFRIPYYVGPLARGNSRFAWMTRKSEE
TITPWNFEEVVDKGASAQSFIERMTNFDKNLPNEKVLPKHSLLYE
YFTVYNELTKVKYVTEGMRKPAFLSGEQKKAIVDLLFKTNRKVTV
KQLKEDYFKKIECFDSVEISGVEDRFNASLGTYHDLLKIIKDKDF
LDNEENEDILEDIVLTLTLFEDREMIEERLKTYAHLFDDKVMKQL
KRRRYTGWGRLSRKLINGIRDKQSGKTILDFLKSDGFANRNFMQL
IHDDSLTFKEDIQKAQVSGQGDSLHEHIANLAGSPAIKKGILQTV
KVVDELVKVMGRHKPENIVIEMARENQTTQKGQKNSRERMKRIEE
GIKELGSQILKEHPVENTQLQNEKLYLYYLQNGRDMYVDQELDIN
RLSDYDVDHIVPQSFLKDDSIDNKVLTRSDKNRGKSDNVPSEEVV
KKMKNYWRQLLNAKLITQRKFDNLTKAERGGLSELDKAGFIKRQL
VETRQITKHVAQILDSRMNTKYDENDKLIREVKVITLKSKLVSDF
RKDFQFYKVREINNYHHAHDAYLNAVVGTALIKKYPKLESEFVYG
DYKVYDVRKMIAKSEQEIGKATAKYFFYS
SGGSKRTADGSEFEPKKKRKV
ABE8e-SaCas9 dimer editor: NLS, wtTadA,
linker, TadA*, SaCas9
(SEQ ID NO: 205)
MKRTADGSEFESPKKKRKVSEVEFSHEYWMRHALTLAKRAWDERE
VPVGAVLVHNNRVIGEGWNRPIGRHDPTAHAEIMALRQGGLVMQN
YRLIDATLYVTLEPCVMCAGAMIHSRIGRVVFGARDAKTGAAGSL
MDVLHHPGMNHRVEITEGILADECAALLSDFFRMRRQEIKAQKKA
QSSTDSGGSSGGSSGSETPGTSESATPESSGGSSGGSSEVEFSHE
YWMRHALTLAKRARDEREVPVGAVLVLNNRVIGEGWNRAIGLHDP
TAHAEIMALRQGGLVMQNYRLIDATLYVTFEPCVMCAGAMIHSRI
GRWFGVRNSKRGAAGSEMNVLNYPGMNHRVEITEGILADECAALL
CDFYRMPRQVFNAQKKAQSSINSGGSSGGSSGSETPGTSESATPE
SSGGSSGGSGKRNYILGLAIGITSVGYGIIDYETRDVIDAGVRLF
KEANVENNEGRRSKRGARRLKRRRRHRIQRVKKLLFDYNLLTDHS
ELSGINPYEARVKGLSQKLSEEEFSAALLHLAKRRGVHNVNEVEE
DTGNELSTKEQISRNSKALEEKYVAELQLERLKKDGEVRGSINRF
KTSDYVKEAKQLLKVQKAYHQLDQSFIDTYIDLLETRRTYYEGPG
EGSPFGWKDIKEWYEMEMGHCTYFPEELRSVKYAYNADLYNALND
LNNLVITRDENEKLEYYEKFQIIENVFKQKKKPTLKQIAKEILVN
EEDIKGYRVTSTGKPEFTNLKVYHDIKDITARKEIIENAELLDQI
AKILTIYQSSEDIQEELTNLNSELTQEEIEQISNLKGYTGTHNLS
LKAINLILDELWHTNDNQIAIFNRLKLVPKKVDLSQQKEIPTTLV
DDFILSPWKRSFIQSIKVINAIIKKYGLPNDIIIELAREKNSKDA
QKMINEMQKRNRQTNERIEEIIRTTGKENAKYLIEKIKLHDMQEG
KCLYSLEAIPLEDLLNNPFNYEVDHIIPRSVSFDNSFNNKVLVKQ
EENSKKGNRTPFQYLSSSDSKISYETFKKHILNLAKGKGRISKTK
KEYLLEERDINRFSVQKDFINRNLVDTRYATRGEMNLLRSYFRVN
NLDVKVKSINGGFTSFLRRKWKFKKERNKGYKHHAEDALIIANAD
FIFKEWKKLDKAKKVMENQMFEEKQAESMPEIETEQEYKEIFITP
HQIKHIKDFKDYKYSHRVDKKPNRELINDTLYSTRKDDKGNTLIV
NNLNGLYDKDNDKLKKLINKSPEKLEMYHHDPQTYQKLKLIMEQY
GDEKNPLYKYYEETGNYLTKYSKKDNGPVIKKIKYYGNKLNAHLD
ITDDYPNSRNKWKLSLKPYRFDVYLDNGVYKFVTVKNLDVIKKEN
YYEVNSKCYEEAKKLKKISNQAEFIASFYNNDLIKINGELYRVIG
VNNDLLNRIEVNMIDITYREYLENMNDKRPPRIIKTIASKTQSIK
KYSTDILGNLYEVKSKKHPQIIKKGSGGSKRTADGSEFEPKKKRK
V
ABE8e-SaCas9 monomer editor: NLS, linker,
TadA*, SaCas9
(SEQ ID NO: 204)
MKRTADGSEFESPKKKRKVSEVEFSHEYWMRHALTLAKRARDERE
VPVGAVLVLNNRVIGEGWNRAIGLHDPTAHAEIMALRQGGLVMQN
YRLIDATLYVTFEPCVMCAGAMIHSRIGRVVFGVRNSKRGAAGSL
MNVLNYPGMNHRVEITEGILADECAALLCDFYRMPRQVFNAQKKA
QSSINSGGSSGGSSGSETPGTSESATPESSGGSSGGSGKRNYILG
LAIGITSVGYGIIDYETRDVIDAGVRLFKEANVENNEGRRSKRGA
RRLKRRRRHRIQRVKKLLFDYNLLTDHSELSGINPYEARVKGLSQ
KLSEEEFSAALLHLAKRRGVHNVNEVEEDTGNELSTKEQISRNSK
ALEEKYVAELQLERLKKDGEVRGSINRFKTSDYVKEAKQLLKVQK
AYHQLDQSFIDTYIDLLETRRTYYEGPGEGSPFGWKDIKEWYEML
MGHCTYFPEELRSVKYAYNADLYNALNDLNNLVITRDENEKLEYY
EKFQIIENVFKQKKKPTLKQIAKEILVNEEDIKGYRVTSTGKPEF
TNLKVYHDIKDITARKEIIENAELLDQIAKILTIYQSSEDIQEEL
TNLNSELTQEEIEQISNLKGYTGTHNLSLKAINLILDELWHTNDN
QIAIFNRLKLVPKKVDLSQQKEIPTTLVDDFILSPVVKRSFIQSI
KVINAIIKKYGLPNDIIIELAREKNSKDAQKMINEMQKRNRQTNE
RIEEIIRTTGKENAKYLIEKIKLHDMQEGKCLYSLEAIPLEDLLN
NPFNYEVDHIIPRSVSFDNSFNNKVLVKQEENSKKGNRTPFQYLS
SSDSKISYETFKKHILNLAKGKGRISKTKKEYLLEERDINRFSVQ
KDFINRNLVDTRYATRGLMNLLRSYFRVNNLDVKVKSINGGFTSF
LRRKWKFKKERNKGYKHHAEDALIIANADFIFKEWKKLDKAKKVM
ENQMFEEKQAESMPEIETEQEYKEIFITPHQIKHIKDFKDYKYSH
RVDKKPNRELINDTLYSTRKDDKGNTLIVNNLNGLYDKDNDKLKK
LINKSPEKLLMYHHDPQTYQKLKLIMEQYGDEKNPLYKYYEETGN
YLTKYSKKDNGPVIKKIKYYGNKLNAHLDITDDYPNSRNKVVKLS
LKPYRFDVYLDNGVYKFVTVKNLDVIKKENYYEVNSKCYEEAKKL
KKISNQAEFIASFYNNDLIKINGELYRVIGVNNDLLNRIEVNMID
ITYREYLENMNDKRPPRIIKTIASKTQSIKKYSTDILGNLYEVKS
KKHPQIIKK
GSGGSKRTADGSEFEPKKKRKV
ABESe-NRCH dimer editor: NLS, wtTadA,
linker, TadA*, SpCas9-NRCH
(SEQ ID NO: 3246)
MKRTADGSEFESPKKKRKVSEVEFSHEYWMRHALTLAKRAWDERE
VPVGAVLVHNNRVIGEGWNRPIGRHDPTAHAEIMALRQGGLVMQN
YRLIDATLYVTLEPCVMCAGAMIHSRIGRVVFGARDAKTGAAGSL
MDVLHHPGMNHRVEITEGILADECAALLSDFFRMRRQEIKAQKKA
QSSTDSGGSSGGSSGSETPGTSESATPESSGGSSGGSSEVEFSHE
YWMRHALTLAKRARDEREVPVGAVLVLNNRVIGEGWNRAIGLHDP
TAHAEIMALRQGGLVMQNYRLIDATLYVTFEPCVMCAGAMIHSRI
GRWFGVRNSKRGAAGSEMNVLNYPGMNHRVEITEGILADECAALL
CDFYRMPRQVFNAQKKAQSSINSGGSSGGSSGSETPGESESATPE
SSGGSSGGSDKKYSIGLAIGTNSVGWAVITDEYKVPSKKFKVLGN
TDRHSIKKNLIGALLFDSGETAEATRLKRTARRRYTRRKNRICYL
QEIFSNEMAKVDDSFFHRLEESFLVEEDKKHERHPIFGNIVDEVA
YHEKYPTIYHLRKKLVDSTDKADLRLIYLALAHMIKFRGHFLIEG
DLNPDNSDVDKLFIQLVQTYNQLFEENPINASGVDAKAILSARLS
KSRRLENLIAQLPGEKKNGLFGNLIALSLGLTPNFKSNFDLAEDA
KLQLSKDTYDDDLDNLLAQIGDQYADLFLAAKNLSDAILLSDILR
VNTEITKAPLSASMVKRYDEHHQDLTLLKALVRQQLPEKYKEIFF
DQSKNGYAGYIDGGASQEEFYKFIKPILEKMDGTEELLVKLNRED
LLRKQRTFDNGIIPHQIHLGELHAILRRQGDFYPFLKDNREKIEK
ILTFRIPYYVGPLARGNSRFAWMTRKSEETITPWNFEEVVDKGAS
AQSFIERMTNFDKNLPNEKVLPKHSLLYEYFTVYNELTKVKYVTE
GMRKPAFLSGEQKKAIVDLLFKTNRKVTVKQLKEDYFKKIECFDS
VEISGVEDRFNASLGTYHDLLKIIKDKDFLDNEENEDILEDIVLT
LTLFEDREMIEERLKTYAHLFDDKVMKQLKRLRYTGWGRLSRKLI
NGIRDKQSGKTILDFLKSDGFANRNFMQLIHDDSLTFKEDIQKAQ
VSCQGDSLHEHIANLAGSPAIKKGILQTVKWDELIKVMGGHKPEN
IVIEMARENQTTQKGQKNSRERMKRIEEGIKELGSQILKEHPVEN
TQLQNEKLYLYYLQNGRDMYVDQELDINRLSDYDVDHIVPQSFLK
DDSIENKVLTRSDKNRGKSDNVPSEEWKKMKNYWRQLLNAKLITQ
RKFDNLTKAERGGLSELDKAGFIKRQLAETRQITKHVAQILDSRM
NTKYDENDKLIREVKVITLKSKLVSDFRKDFQFYKVREINNYHHA
HDAYLNAWGTALIKKYPKLESEFVYGDYKVYDVRKMIAKSEQEIG
KATAKYFFYSNIMNFFKTEITLANGEIRKRPLIETNGETGEIVWD
KGRDFATVRKVLSMPQVNIVKKTEVQTGGFSKESILPKGNSDKLI
ARKKDWDPKKYGGFNSPTVAYSVLVVAKVEKGKSKKLKSVKELLG
ITIMERSSFEKNPIDFLEAKGYKEVKKDLIIKLPKYSLFELENGR
KRMLASAGVLQKGNELALPSKYVNFLYLASHYEKLKGSPEDNEQK
QLFVEQHKHYLDEIIEQISEFSKRVILADANLDKVLSAYNKHRDK
PIREQAENIIHLFTLTNLGAPAAFKYFDTTINRKQYNTTKEVLDA
TLIRQSITGLYETRIDLSQLGGDSGGSKRTADGSYYYYKKKRKN
ABEZe-NRCH monomer editor: NLS, linker,
TadA*, SpCas9-NRCH
(SEQ ID NO: 3247)
MKRTADGSEFESPKKKRKVSEVEFSHEYWMRHALTLAKRARDERE
VPVGAVLVLNNRVIGEGWNRAIGLHDPTAHAEIMALRQGGLVMQN
YRLIDATLYVTFEPCVMCAGAMIHSRIGRVVFGVRNSKRGAAGSL
MNVLNYPGMNHRVEITEGILADECAALLCDFYRMPRQVFNAQKKA
QSSINSGGSSGGSSGSETPGTSESATPESSGGSSGGSDKKYSIGL
AIGTNSVGWAVITDEYKVPSKKFKVLGNTDRHSIKKNLIGALLFD
SGETAEATRLKRTARRRYTRRKNRICYLQEIFSNEMAKVDDSFFH
RLEESFLVEEDKKHERHPIFGNIVDEVAYHEKYPTIYHLRKKLVD
STDKADLRLIYLALAHMIKFRGHFLIEGDLNPDNSDVDKLFIQLV
QTYNQLFEENPINASGVDAKAILSARLSKSRRLENLIAQLPGEKK
NGLFGNLIALSLGLTPNFKSNFDLAEDAKLQLSKDTYDDDLDNLL
AQIGDQYADLFLAAKNLSDAILLSDILRVNTEITKAPLSASMVKR
YDEHHQDLTLLKALVRQQLPEKYKEIFFDQSKNGYAGYIDGGASQ
EEFYKFIKPILEKMDGTEELLVKLNREDLLRKQRTFDNGIIPHQI
HLGELHAILRRQGDFYPFLKDNREKIEKILTFRIPYYVGPLARGN
SRFAWMTRKSEETITPWNFEEVVDKGASAQSFIERMTNFDKNLPN
EKVLPKHSLLYEYFTVYNELTKVKYVTEGMRKPAFLSGEQKKAIV
DLLFKTNRKVTVKQLKEDYFKKIECFDSVEISGVEDRFNASLGTY
HDLLKIIKDKDFLDNEENEDILEDIVLTLTLFEDREMIEERLKTY
AHLFDDKVMKQLKRLRYTGWGRLSRKLINGIRDKQSGKTILDFLK
SDGFANRNFMQLIHDDSLTFKEDIQKAQVSCQGDSLHEHIANLAG
SPAIKKGILQTVKVVDELIKVMGGHKPENIVIEMARENQTTQKGQ
KNSRERMKRIEEGIKELGSQILKEHPVENTQLQNEKLYLYYLQNG
RDMYVDQELDINRLSDYDVDHIVPQSFLKDDSIENKVLTRSDKNR
GKSDNVPSEEVVKKMKNYWRQLLNAKLITQRKFDNLTKAERGGLS
ELDKAGFIKRQLAETRQITKHVAQILDSRMNTKYDENDKLIREVK
VITLKSKLVSDFRKDFQFYKVREINNYHHAHDAYLNAVVGTALIK
KYPKLESEFVYGDYKVYDVRKMIAKSEQEIGKATAKYFFYSNIMN
FFKTEITLANGEIRKRPLIETNGETGEIVWDKGRDFATVRKVLSM
PQVNIVKKTEVQTGGFSKESILPKGNSDKLIARKKDWDPKKYGGF
NSPTVAYSVLVVAKVEKGKSKKLKSVKELLGITIMERSSFEKNPI
DFLEAKGYKEVKKDLIIKLPKYSLFELENGRKRMLASAGVLQKGN
ELALPSKYVNFLYLASHYEKLKGSPEDNEQKQLFVEQHKHYLDEI
IEQISEFSKRVILADANLDKVLSAYNKHRDKPIREQAENIIHLFT
LTNLGAPAAFKYFDTTINRKQYNTTKEVLDATLIRQSITGLYETR
IDLSQLGGD
SGGSKRTADGSEFEPKKKRKV
ABE8e-NRRHdimer editor: NLS, wtTadA, linker,
TadA*, SpCas9-NRRH
(SEQ ID NO: 3248)
MKRTADGSEFESPKKKRKVSEVEFSHEYWMRHALTLAKRAWDERE
VPVGAVLVHNNRVIGEGWNRPIGRHDPTAHAEIMALRQGGLVMQN
YRLIDATLYVTLEPCVMCAGAMIHSRIGRVVFGARDAKTGAAGSL
MDVLHHPGMNHRVEITEGILADECAALLSDFFRMRRQEIKAQKKA
QSSTDSGGSSGGSSGSETPGTSESATPESSGGSSGGSSEVEFSHE
YWMRHALTLAKRARDEREVPVGAVLVLNNRVIGEGWNRAIGLHDP
TAHAEIMALRQGGLVMQNYRLIDATLYVTFEPCVMCAGAMIHSRI
GRWFGVRNSKRGAAGSEMNVLNYPGMNHRVEITEGILADECAALL
CDFYRMPRQVFNAQKKAQSSINSGGSSGGSSGSETPGTSESATPE
SSGGSSGGSDKKYSIGLAIGTNSVGWAVITDEYKVPSKKFKVLGN
TDRHSIKKNLIGALLFDSGETAEATRLKRTARRRYTRRKNRICYL
QEIFSNEMAKVDDSFFHRLEESFLVEEDKKHERHPIFGNIVDEVA
YHEKYPTIYHLRKKLVDSTDKADLRLIYLALAHMIKFRGHFLIEG
DLNPDNSDVDKLFIQLVQTYNQLFEENPINASGVDAKAILSARLS
KSRRLENLIAQLPGEKKNGLFGNLIALSLGLTPNFKSNFDLAEDA
KLQLSKDTYDDDLDNLLAQIGDQYADLFLAAKNLSDAILLSDILR
VNTEITKAPLSASMVKRYDEHHQDLTLLKALVRQQLPEKYKEIFF
DQSKNGYAGYIDGGASQEEFYKFIKPILEKMDGTEELLVKLNRED
LLRKQRTFDNGIIPHQIHLGELHAILRRQGDFYPFLKDNREKIEK
ILTFRIPYYVGPLARGNSRFAWMTRKSEETITPWNFEEVVDKGAS
AQSFIERMTNFDKNLPNEKVLPKHSLLYEYFTVYNELTKVKYVTE
GMRKPAFLSGEQKKAIVDLLFKTNRKVTVKQLKEDYFKKIECFDS
VEISGVEDRFNASLGTYHDLLKIIKDKDFLDNEENEDILEDIVLT
LTLFEDREMIEERLKTYAHLFDDKVMKQLKRLRYTGWGRLSRKLI
NGIRDKQSGKTILDFLKSDGFANRNFMQLIHDDSLTFKEDIQKAQ
VSCQGDSLHEHIANLAGSPAIKKGILQTVKWDELIKVMGGHKPEN
IVIEMARENQTTQKGQKNSRERMKRIEEGIKELGSQILKEHPVEN
TQLQNEKLYLYYLQNGRDMYVDQELDINRLSDYDVDHIVPQSFLK
DDSIENKVLTRSDKNRGKSDNVPSEEWKKMKNYWRQLLNAKLITQ
RKFDNLTKAERGGLSELDKAGFIKRQLAETRQITKHVAQILDSRM
NTKYDENDKLIREVKVITLKSKLVSDFRKDFQFYKVREINNYHHA
HDAYLNAWGTALIKKYPKLESEFVYGDYKVYDVRKMIAKSEQEIG
KATAKYFFYSNIMNFFKTEITLANGEIRKRPLIETNGETGEIVWD
KGRDFATVRKVLSMPQVNIVKKTEVQTGGFSKESILPKGNSDKLI
ARKKDWDPKKYGGFNSPTAAYSVLVVAKVEKGKSKKLKSVKELLG
ITIMERSSFEKNPIGFLEAKGYKEVKKDLIIKLPKYSLFELENGR
KRMLASAGVLHKGNELALPSKYVNFLYLASHYEKLKGSPEDNEQK
QLFVEQHKHYLDEIIEQISEFSKRVILADANLDKVLSAYNKHRDK
PIREQAENIIHLFTLTNLGVPAAFKYFDTTIDKKRYTSTKEVLDA
TLIHQSITGLYETRIDLSQLGGDSGGSKWYNDGSYYPPKKKRKN
ABE8e-NRRH monomer editor: NLS, linker,
TadA*, SpCas9-NRRH
(SEQ ID NO: 3249)
MKRTADGSEFESPKKKRKVSEVEFSHEYWMRHALTLAKRARDERE
VPVGAVLVLNNRVIGEGWNRAIGLHDPTAHAEIMALRQGGLVMQN
YRLIDATLYVTFEPCVMCAGAMIHSRIGRVVFGVRNSKRGAAGSL
MNVLNYPGMNHRVEITEGILADECAALLCDFYRMPRQVFNAQKKA
QSSINSGGSSGGSSGSETPGTSESATPESSGGSSGGSDKKYSIGL
AIGTNSVGWAVITDEYKVPSKKFKVLGNTDRHSIKKNLIGALLFD
SGETAEATRLKRTARRRYTRRKNRICYLQEIFSNEMAKVDDSFFH
RLEESFLVEEDKKHERHPIFGNIVDEVAYHEKYPTIYHLRKKLVD
STDKADLRLIYLALAHMIKFRGHFLIEGDLNPDNSDVDKLFIQLV
QTYNQLFEENPINASGVDAKAILSARLSKSRRLENLIAQLPGEKK
NGLFGNLIALSLGLTPNFKSNFDLAEDAKLQLSKDTYDDDLDNLL
AQIGDQYADLFLAAKNLSDAILLSDILRVNTEITKAPLSASMVKR
YDEHHQDLTLLKALVRQQLPEKYKEIFFDQSKNGYAGYIDGGASQ
EEFYKFIKPILEKMDGTEELLVKLNREDLLRKQRTFDNGIIPHQI
HLGELHAILRRQGDFYPFLKDNREKIEKILTFRIPYYVGPLARGN
SRFAWMTRKSEETITPWNFEEVVDKGASAQSFIERMTNFDKNLPN
EKVLPKHSLLYEYFTVYNELTKVKYVTEGMRKPAFLSGEQKKAIV
DLLFKTNRKVTVKQLKEDYFKKIECFDSVEISGVEDRFNASLGTY
HDLLKIIKDKDFLDNEENEDILEDIVLTLTLFEDREMIEERLKTY
AHLFDDKVMKQLKRLRYTGWGRLSRKLINGIRDKQSGKTILDFLK
SDGFANRNFMQLIHDDSLTFKEDIQKAQVSCQGDSLHEHIANLAG
SPAIKKGILQTVKVVDELIKVMGGHKPENIVIEMARENQTTQKGQ
KNSRERMKRIEEGIKELGSQILKEHPVENTQLQNEKLYLYYLQNG
RDMYVDQELDINRLSDYDVDHIVPQSFLKDDSIENKVLTRSDKNR
GKSDNVPSEEVVKKMKNYWRQLLNAKLITQRKFDNLTKAERGGLS
ELDKAGFIKRQLAETRQITKHVAQILDSRMNTKYDENDKLIREVK
VITLKSKLVSDFRKDFQFYKVREINNYHHAHDAYLNAVVGTALIK
KYPKLESEFVYGDYKVYDVRKMIAKSEQEIGKATAKYFFYSNIMN
FFKTEITLANGEIRKRPLIETNGETGEIVWDKGRDFATVRKVLSM
PQVNIVKKTEVQTGGFSKESILPKGNSDKLIARKKDWDPKKYGGF
NSPTAAYSVLVVAKVEKGKSKKLKSVKELLGITIMERSSFEKNPI
GFLEAKGYKEVKKDLIIKLPKYSLFELENGRKRMLASAGVLHKGN
ELALPSKYVNFLYLASHYEKLKGSPEDNEQKQLFVEQHKHYLDEI
IEQISEFSKRVILADANLDKVLSAYNKHRDKPIREQAENIIHLFT
LTNLGVPAAFKYFDTTIDKKRYTSTKEVLDATLIHQSITGLYETR
IDLSQLGGDSGGSKRTADGSEFEPKKKRKV
SaKKH-ABE8e dimer editor: NLS, wtTadA,
linker, TadA*, SaKKH
(SEQ ID NO: 3250)
MKRTADGSEFESPKKKRKVSEVEFSHEYWMRHALTLAKRAWDERE
VPVGAVLVHNNRVIGEGWNRPIGRHDPTAHAEIMALRQGGLVMQN
YRLIDATLYVTLEPCVMCAGAMIHSRIGRVVFGARDAKTGAAGSL
MDVLHHPGMNHRVEITEGILADECAALLSDFFRMRRQEIKAQKKA
QSSTDSGGSSGGSSGSETPGTSESATPESSGGSSGGSSEVEFSHE
YWMRHALTLAKRARDEREVPVGAVLVLNNRVIGEGWNRAIGLHDP
TAHAEIMALRQGGLVMQNYRLIDATLYVTFEPCVMCAGAMIHSRI
GRVVFGVRNSKRGAAGSEMNVLNYPGMNHRVEITEGILADECAAL
LCDFYRMPRQVFNAQKKAQSSINSGGSSGGSSGSETPGTSESATP
ESSGGSSGGSKRNYILGLAIGITSVGYGIIDYETRDVIDAGV
RLFKEANVENNEGRRSKRGARRLKRRRRHRIQRVKKLLFDYNLLT
DHSELSGINPYEARVKGLSQKLSEEEFSAALLHLAKRRGVHNVNE
VEEDTGNELSTKEQISRNSKALEEKYVAELQLERLKKDGEVRGSI
NRFKTSDYVKEAKQLLKVQKAYHQLDQSFIDTYIDLLETRRTYYE
GPGEGSPFGWKDIKEWYEMEMGHCTYFPEELRSVKYAYNADLYNA
LNDLNNLVITRDENEKLEYYEKFQIIENVFKQKKKPTLKQIAKEI
LVNEEDIKGYRVTSTGKPEFTNLKVYHDIKDITARKEIIENAELL
DQIAKILTIYQSSEDIQEELTNLNSELTQEEIEQISNLKGYTGTH
NLSLKAINLILDELWHTNDNQIAIFNRLKLVPKKVDLSQQKEIPT
TLVDDFILSPWKRSFIQSIKVINAIIKKYGLPNDIIIELAREKNS
KDAQKMINEMQKRNRQTNERIEEIIRTTGKENAKYLIEKIKLHDM
QEGKCLYSLEAIPLEDLLNNPFNYEVDHIIPRSVSFDNSFNNKVL
VKQEENSKKGNRTPFQYLSSSDSKISYETFKKHILNLAKGKGRIS
KTKKEYLLEERDINRFSVQKDFINRNLVDTRYATRGEMNLLRSYF
RVNNLDVKVKSINGGFTSFLRRKWKFKKERNKGYKHHAEDALIIA
NADFIFKEWKKLDKAKKVMENQMFEEKQAESMPEIETEQEYKEIF
ITPHQIKHIKDFKDYKYSHRVDKKPNRKLINDTLYSTRKDDKGNT
LIVNNLNGLYDKDNDKLKKLINKSPEKLLMYHHDPQTYQKLKLIM
EQYGDEKNPLYKYYEETGNYLTKYSKKDNGPVIKKIKYYGNKLNA
HLDITDDYPNSRNKWKLSLKPYRFDVYLDNGVYKFVTVKNLDVIK
KENYYEVNSKCYEEAKKLKKISNQAEFIASFYKNDLIKINGELYR
VIGVNNDLLNRIEVNMIDITYREYLENMNDKRPPHIIKTIASKTQ
SIKKYSTDILGNLYEVKSKKHPQIIKKGSGGSKRTADGSEFEPKK
KRKV
SaKKH-ABESe monomer editor: NLS, linker,
TadA*, SaKKH
(SEQ ID NO: 3251)
MKRTADGSEFESPKKKRKVSEVEFSHEYWMRHALTLAKRARDERE
VPVGAVLVLNNRVIGEGWNRAIGLHDPTAHAEIMALRQGGLVMQN
YRLIDATLYVTFEPCVMCAGAMIHSRIGRVVFGVRNSKRGAAGSL
MNVLNYPGMNHRVEITEGILADECAALLCDFYRMPRQVFNAQKKA
QSSINSGGSSGGSSGSETPGTSESATPESSGGSSGGSGKRNYILG
LAIGITSVGYGIIDYETRDVIDAGVRLFKEANVENNEGRRSKRGA
RRLKRRRRHRIQRVKKLLFDYNLLTDHSELSGINPYEARVKGLSQ
KLSEEEFSAALLHLAKRRGVHNVNEVEEDTGNELSTKEQISRNSK
ALEEKYVAELQLERLKKDGEVRGSINRFKTSDYVKEAKQLLKVQK
AYHQLDQSFIDTYIDLLETRRTYYEGPGEGSPFGWKDIKEWYEML
MGHCTYFPEELRSVKYAYNADLYNALNDLNNLVITRDENEKLEYY
EKFQIIENVFKQKKKPTLKQIAKEILVNEEDIKGYRVTSTGKPEF
TNLKVYHDIKDITARKEIIENAELLDQIAKILTIYQSSEDIQEEL
TNLNSELTQEEIEQISNLKGYTGTHNLSLKAINLILDELWHTNDN
QIAIFNRLKLVPKKVDLSQQKEIPTTLVDDFILSPVVKRSFIQSI
KVINAIIKKYGLPNDIIIELAREKNSKDAQKMINEMQKRNRQTNE
RIEEIIRTTGKENAKYLIEKIKLHDMQEGKCLYSLEAIPLEDLLN
NPFNYEVDHIIPRSVSFDNSFNNKVLVKQEENSKKGNRTPFQYLS
SSDSKISYETFKKHILNLAKGKGRISKTKKEYLLEERDINRFSVQ
KDFINRNLVDTRYATRGLMNLLRSYFRVNNLDVKVKSINGGFTSF
LRRKWKFKKERNKGYKHHAEDALIIANADFIFKEWKKLDKAKKVM
ENQMFEEKQAESMPEIETEQEYKEIFITPHQIKHIKDFKDYKYSH
RVDKKPNRKLINDTLYSTRKDDKGNTLIVNNLNGLYDKDNDKLKK
LINKSPEKLLMYHHDPQTYQKLKLIMEQYGDEKNPLYKYYEETGN
YLTKYSKKDNGPVIKKIKYYGNKLNAHLDITDDYPNSRNKVVKLS
LKPYRFDVYLDNGVYKFVTVKNLDVIKKENYYEVNSKCYEEAKKL
KKISNQAEFIASFYKNDLIKINGELYRVIGVNNDLLNRIEVNMID
ITYREYLENMNDKRPPHIIKTIASKTQSIKKYSTDILGNLYEVKS
KKHPQIIKKG
SGGSKRTADGSEFEPKKKRKV
ABESe-NG dimer editor: NLS, wtTadA, linker,
TadA*, SpCas9-NG
(SEQ ID NO: 213)
MKRTADGSEFESPKKKRKVSEVEFSHEYWMRHALTLAKRAWDERE
VPVGAVLVHNNRVIGEGWNRPIGRHDPTAHAEIMALRQGGLVMQN
YRLIDATLYVTLEPCVMCAGAMIHSRIGRVVFGARDAKTGAAGSL
MDVLHHPGMNHRVEITEGILADECAALLSDFFRMRRQEIKAQKKA
QSSTDSGGSSGGSSGSETPGTSESATPESSGGSSGGSSEVEFSHE
YWMRHALTLAKRARDEREVPVGAVLVLNNRVIGEGWNRAIGLHDP
TAHAEIMALRQGGLVMQNYRLIDATLYVTFEPCVMCAGAMIHSRI
GRVVFGVRNSKRGAAGSEMNVLNYPGMNHRVEITEGILADECAAL
LCDFYRMPRQVFNAQKKAQSSINSGGSSGGSSGSETPGTSESATP
ESSGGSSGGSDKKYSIGLAIGTNSVGWAVITDEYKVPSKKFKVLG
NTDRHSIKKNLIGALLFDSGETAEATRLKRTARRRYTRRKNRICY
LQEIFSNEMAKVDDSFFHRLEESFLVEEDKKHERHPIFGNIVDEV
AYHEKYPTIYHLRKKLVDSTDKADLRLIYLALAHMIKFRGHFLIE
GDLNPDNSDVDKLFIQLVQTYNQLFEENPINASGVDAKAILSARL
SKSRRLENLIAQLPGEKKNGLFGNLIALSLGLTPNFKSNFDLAED
AKLQLSKDTYDDDLDNLLAQIGDQYADLFLAAKNLSDAILLSDIL
RVNTEITKAPLSASMIKRYDEHHQDLTLLKALVRQQLPEKYKEIF
FDQSKNGYAGYIDGGASQEEFYKFIKPILEKMDGTEELLVKLNRE
DLLRKQRTFDNGSIPHQIHLGELHAILRRQEDFYPFLKDNREKIE
KILTFRIPYYVGPLARGNSRFAWMTRKSEETITPWNFEEVVDKGA
SAQSFIERMTNFDKNLPNEKVLPKHSLLYEYFTVYNELTKVKYVT
EGMRKPAFLSGEQKKAIVDLLFKTNRKVTVKQLKEDYFKKIECFD
SVEISGVEDRFNASLGTYHDLLKIIKDKDFLDNEENEDILEDIVL
TLTLFEDREMIEERLKTYAHLFDDKVMKQLKRRRYTGWGRLSRKL
INGIRDKQSGKTILDFLKSDGFANRNFMQLIHDDSLTFKEDIQKA
QVSGQGDSLHEHIANLAGSPAIKKGILQTVKWDELVKVMGRHKPE
NIVIEMARENQTTQKGQKNSRERMKRIEEGIKELGSQILKEHPVE
NTQLQNEKLYLYYLQNGRDMYVDQELDINRLSDYDVDHIVPQSFL
KDDSIDNKVLTRSDKNRGKSDNVPSEEWKKMKNYWRQLLNAKLIT
QRKFDNLTKAERGGLSELDKAGFIKRQLVETRQITKHVAQILDSR
MNTKYDENDKLIREVKVITLKSKLVSDFRKDFQFYKVREINNYHH
AHDAYLNAWGTALIKKYPKLESEFVYGDYKVYDVRKMIAKSEQEI
GKATAKYFFYSNIMNFFKTEITLANGEIRKRPLIETNGETGEIVW
DKGRDFATVRKVLSMPQVNIVKKTEVQTGGFSKESIRPKRNSDKL
IARKKDWDPKKYGGFVSPTVAYSVLWAKVEKGKSKKLKSVKELLG
ITIMERSSFEKNPIDFLEAKGYKEVKKDLIIKLPKYSLFELENGR
KRMLASARFLQKGNELALPSKYVNFLYLASHYEKLKGSPEDNEQK
QLFVEQHKHYLDEIIEQISEFSKRVILADANLDKVLSAYNKHRDK
PIREQAENIIHLFTLTNLGAPRAFKYFDTTIDRKVYRSTKEVLDA
TLIHQSITGLYETRIDLSQLGGDSGGSKRTADGSEFEPKKKRKV
ABEZe-NG monomer editor: NLS, linker,
TadA*, SpCas9-NG (“NG-ABEZe”)
MKRTADGSEFESPKKKRKVSEVEFSHEYWMRHALTLAKRARDERE
(SEQ ID NO: 212)
VPVGAVLVLNNRVIGEGWNRAIGLHDPTAHAEIMALRQGGLVMQN
YRLIDATLYVTFEPCVMCAGAMIHSRIGRVVFGVRNSKRGAAGSL
MNVLNYPGMNHRVEITEGILADECAALLCDFYRMPRQVFNAQKKA
QSSINSGGSSGGSSGSETPGTSESATPESSGGSSGGSDKKYSIGL
AIGTNSVGWAVITDEYKVPSKKFKVLGNTDRHSIKKNLIGALLFD
SGETAEATRLKRTARRRYTRRKNRICYLQEIFSNEMAKVDDSFFH
RLEESFLVEEDKKHERHPIFGNIVDEVAYHEKYPTIYHLRKKLVD
STDKADLRLIYLALAHMIKFRGHFLIEGDLNPDNSDVDKLFIQLV
QTYNQLFEENPINASGVDAKAILSARLSKSRRLENLIAQLPGEKK
NGLFGNLIALSLGLTPNFKSNFDLAEDAKLQLSKDTYDDDLDNLL
AQIGDQYADLFLAAKNLSDAILLSDILRVNTEITKAPLSASMIKR
YDEHHQDLTLLKALVRQQLPEKYKEIFFDQSKNGYAGYIDGGASQ
EEFYKFIKPILEKMDGTEELLVKLNREDLLRKQRTFDNGSIPHQI
HLGELHAILRRQEDFYPFLKDNREKIEKILTFRIPYYVGPLARGN
SRFAWMTRKSEETITPWNFEEVVDKGASAQSFIERMTNFDKNLPN
EKVLPKHSLLYEYFTVYNELTKVKYVTEGMRKPAFLSGEQKKAIV
DLLFKTNRKVTVKQLKEDYFKKIECFDSVEISGVEDRFNASLGTY
HDLLKIIKDKDFLDNEENEDILEDIVLTLTLFEDREMIEERLKTY
AHLFDDKVMKQLKRRRYTGWGRLSRKLINGIRDKQSGKTILDFLK
SDGFANRNFMQLIHDDSLTFKEDIQKAQVSGQGDSLHEHIANLAG
SPAIKKGILQTVKVVDELVKVMGRHKPENIVIEMARENQTTQKGQ
KNSRERMKRIEEGIKELGSQILKEHPVENTQLQNEKLYLYYLQNG
RDMYVDQELDINRLSDYDVDHIVPQSFLKDDSIDNKVLTRSDKNR
GKSDNVPSEEVVKKMKNYWRQLLNAKLITQRKFDNLTKAERGGLS
ELDKAGFIKRQLVETRQITKHVAQILDSRMNTKYDENDKLIREVK
VITLKSKLVSDFRKDFQFYKVREINNYHHAHDAYLNAVVGTALIK
KYPKLESEFVYGDYKVYDVRKMIAKSEQEIGKATAKYFFYSNIMN
FFKTEITLANGEIRKRPLIETNGETGEIVWDKGRDFATVRKVLSM
PQVNIVKKTEVQTGGFSKESIRPKRNSDKLIARKKDWDPKKYGGF
VSPTVAYSVLVVAKVEKGKSKKLKSVKELLGITIMERSSFEKNPI
DFLEAKGYKEVKKDLIIKLPKYSLFELENGRKRMLASARFLQKGN
ELALPSKYVNFLYLASHYEKLKGSPEDNEQKQLFVEQHKHYLDEI
IEQISEFSKRVILADANLDKVLSAYNKHRDKPIREQAENIIHLFT
LTNLGAPRAFKYFDTTIDRKVYRSTKEVLDATLIHQSITGLYETR
IDLSQLGGD
SGGSKRTADGSEFEPKKKRKV
ABE8e-CP 1041 dimer editor: NLS, wtTadA,
linker, TadA*, CP 1041
(SEQ ID NO: 3252)
MKRTADGSEFESPKKKRKVSEVEFSHEYWMRHALTLAKRAWDERE
VPVGAVLVHNNRVIGEGWNRPIGRHDPTAHAEIMALRQGGLVMQN
YRLIDATLYVTLEPCVMCAGAMIHSRIGRVVFGARDAKTGAAGSL
MDVLHHPGMNHRVEITEGILADECAALLSDFFRMRRQEIKAQKKA
QSSTDSGGSSGGSSGSETPGTSESATPESSGGSSGGSSEVEFSHE
YWMRHALTLAKRARDEREVPVGAVLVLNNRVIGEGWNRAIGLHDP
TAHAEIMALRQGGLVMQNYRLIDATLYVTFEPCVMCAGAMIHSRI
GRVVFGVRNSKRGAAGSEMNVLNYPGMNHRVEITEGILADECAAL
LCDFYRMPRQVFNAQKKAQSSINSGGSSGGSSGSYYYGYSPSKYY
PSSGGSSGGSNIMNFFKTEITLANGEIRKRPLIETNGETGEIVWD
KGRDFATVRKVLSMPQVNIVKKTEVQTGGFSKESILPKRNSDKLI
ARKKDWDPKKYGGFDSPTVAYSVLVVAKVEKGKSKKLKSVKELLG
ITIMERSSFEKNPIDFLEAKGYKEVKKDLIIKLPKYSLFELENGR
KRMLASAGELQKGNELALPSKYVNFLYLASHYEKLKGSPEDNEQK
QLFVEQHKHYLDEIIEQISEFSKRVILADANLDKVLSAYNKHRDK
PIREQAENIIHLFTLTNLGAPAAFKYFDTTIDRKRYTSTKEVLDA
TLIHQSITGLYETRIDLSQLGGDGGSGGSGGSGGSGGSGGSGGDK
KYSIGLAIGTNSVGWAVITDEYKVPSKKFKVLGNTDRHSIKKNLI
GALLFDSGETAEATRLKRTARRRYTRRKNRJCYLQEIFSNEMAKV
DDSFFHRLEESFLVEEDKKHERHPIFGNIVDEVAYHEKYPTIYHL
RKKLVDSTDKADLRLIYLALAHMIKFRGHFLIEGDLNPDNSDVDK
LFIQLVQTYNQLFEENPINASGVDAKAILSARLSKSRRLENLIAQ
LPGEKKNGLFGNLIALSLGLTPNFKSNFDLAEDAKLQLSKDTYDD
DLDNLLAQIGDQYADLFLAAKNLSDAILLSDILRVNTEITKAPLS
ASMIKRYDEHHQDLTLLKALVRQQLPEKYKEIFFDQSKNGYAGYI
DGGASQEEFYKFIKPILEKMDGTEELLVKLNREDLLRKQRTFDNG
SIPHQIHLGELHAILRRQEDFYPFLKDNREKIEKILTFRIPYYVG
PLARGNSRFAWMTRKSEETITPWNFEEVVDKGASAQSFIERMTNF
DKNLPNEKVLPKHSLLYEYFTVYNELTKVKYVTEGMRKPAFLSGE
QKKAIVDLLFKTNRKVTVKQLKEDYFKKIECFDSVEISGVEDRFN
ASLGTYHDLLKIIKDKDFLDNEENEDILEDIVLTLTLFEDREMIE
ERLKTYAHLFDDKVMKQLKRRRYTGWGRLSRKLINGIRDKQSGKT
ILDFLKSDGFANRNFMQLIHDDSLTFKEDIQKAQVSGQGDSLHEH
IANLAGSPAIKKGILQTVKWDELVKVMGRHKPENIVIEMARENQT
TQKGQKNSRERMKRIEEGIKELGSQILKEHPVENTQLQNEKLYLY
YLQNGRDMYVDQELDINRLSDYDVDHIVPQSFLKDDSIDNKVLTR
SDKNRGKSDNVPSEEWKKMKNYWRQLLNAKLITQRKFDNLTKAER
GGLSELDKAGFIKRQLVETRQITKHVAQILDSRMNTKYDENDKLI
REVKVITLKSKLVSDFRKDFQFYKVREINNYHHAHDAYLNAVVGT
ALIKKYPKLESEFVYGDYKVYDVRKMIAKSEQEIGKATAKYFFYS
SGGSKRANDGSEFEPKKKRKV
ABE8e-CP1041 monomer editor: NLS, linker,
TadA*, CP1041
(SEQ ID NO: 218)
MKRTADGSEFESPKKKRKVSEVEFSHEYWMRHALTLAKRARDERE
VPVGAVLVLNNRVIGEGWNRAIGLHDPTAHAEIMALRQGGLVMQN
YRLIDATLYVTFEPCVMCAGAMIHSRIGRVVFGVRNSKRGAAGSL
MNVLNYPGMNHRVEITEGILADECAALLCDFYRMPRQVFNAQKKA
QSSINSGGSSGGSSGSETPGTSESATPESSGGSSGGSNIMNFFKT
EITLANGEIRKRPLIETNGETGEIVWDKGRDFATVRKVLSMPQVN
IVKKTEVQTGGFSKESILPKRNSDKLIARKKDWDPKKYGGFDSPT
VAYSVLVVAKVEKGKSKKLKSVKELLGITIMERSSFEKNPIDFLE
AKGYKEVKKDLIIKLPKYSLFELENGRKRMLASAGELQKGNELAL
PSKYVNFLYLASHYEKLKGSPEDNEQKQLFVEQHKHYLDEIIEQI
SEFSKRVILADANLDKVLSAYNKHRDKPIREQAENIIHLFTLTNL
GAPAAFKYFDTTIDRKRYTSTKEVLDATLIHQSITGLYETRIDLS
QLGGDGGSGGSGGSGGSGGSGGSGGDKKYSIGLAIGTNSVGWAVI
TDEYKVPSKKFKVLGNTDRHSIKKNLIGALLFDSGETAEATRLKR
TARRRYTRRKNRICYLQEIFSNEMAKVDDSFFHRLEESFLVEEDK
KHERHPIFGNIVDEVAYHEKYPTIYHLRKKLVDSTDKADLRLIYL
ALAHMIKFRGHFLIEGDLNPDNSDVDKLFIQLVQTYNQLFEENPI
NASGVDAKAILSARLSKSRRLENLIAQLPGEKKNGLFGNLIALSL
GLTPNFKSNFDLAEDAKLQLSKDTYDDDLDNLLAQIGDQYADLFL
AAKNLSDAILLSDILRVNTEITKAPLSASMIKRYDEHHQDLTLLK
ALVRQQLPEKYKEIFFDQSKNGYAGYIDGGASQEEFYKFIKPILE
KMDGTEELLVKLNREDLLRKQRTFDNGSIPHQIHLGELHAILRRQ
EDFYPFLKDNREKIEKILTFRIPYYVGPLARGNSRFAWMTRKSEE
TITPWNFEEVVDKGASAQSFIERMTNFDKNLPNEKVLPKHSLLYE
YFTVYNELTKVKYVTEGMRKPAFLSGEQKKAIVDLLFKTNRKVTV
KQLKEDYFKKIECFDSVEISGVEDRFNASLGTYHDLLKIIKDKDF
LDNEENEDILEDIVLTLTLFEDREMIEERLKTYAHLFDDKVMKQL
KRRRYTGWGRLSRKLINGIRDKQSGKTILDFLKSDGFANRNFMQL
IHDDSLTFKEDIQKAQVSGQGDSLHEHIANLAGSPAIKKGILQTV
KVVDELVKVMGRHKPENIVIEMARENQTTQKGQKNSRERMKRIEE
GIKELGSQILKEHPVENTQLQNEKLYLYYLQNGRDMYVDQELDIN
RLSDYDVDHIVPQSFLKDDSIDNKVLTRSDKNRGKSDNVPSEEVV
KKMKNYWRQLLNAKLITQRKFDNLTKAERGGLSELDKAGFIKRQL
VETRQITKHVAQILDSRMNTKYDENDKLIREVKVITLKSKLVSDF
RKDFQFYKVREINNYHHAHDAYLNAVVGTALIKKYPKLESEFVYG
DYKVYDVRKMIAKSEQEIGKATAKYFFYSSGGSKRTADGSEFEPK
KKRKV
ABE8e-CP1028 dimer editor: NLS, wtTadA,
linker, TadA*, CP 1028
(SEQ ID NO: 217)
MKRTADGSEFESPKKKRKVSEVEFSHEYWMRHALTLAKRAWDERE
VPVGAVLVHNNRVIGEGWNRPIGRHDPTAHAEIMALRQGGLVMQN
YRLIDATLYVTLEPCVMCAGAMIHSRIGRVVFGARDAKTGAAGSL
MDVLHHPGMNHRVEITEGILADECAALLSDFFRMRRQEIKAQKKA
QSSTDSGGSSGGSSGSETPGTSESATPESSGGSSGGSSEVEFSHE
YWMRHALTLAKRARDEREVPVGAVLVLNNRVIGEGWNRAIGLHDP
TAHAEIMALRQGGLVMQNYRLIDATLYVTFEPCVMCAGAMIHSRI
GRVVFGVRNSKRGAAGSEMNVLNYPGMNHRVEITEGILADECAAL
LCDFYRMPRQVFNAQKKAQSSINSGGSSGGSSGSEEPGESESATP
ESSGGSSGGSEIGKATAKYFFYSNIMNFFKTEITLANGEIRKRPL
IETNGETGEIVWDKGRDFATVRKVLSMPQVNIVKKTEVQTGGFSK
ESILPKRNSDKLIARKKDWDPKKYGGFDSPTVAYSVLWAKVEKGK
SKKLKSVKELLGITIMERSSFEKNPIDFLEAKGYKEVKKDLIIKL
PKYSLFELENGRKRMLASAGELQKGNELALPSKYVNFLYLASHYE
KLKGSPEDNEQKQLFVEQHKHYLDEIIEQISEFSKRVILADANLD
KVLSAYNKHRDKPIREQAENIIHLFTLTNLGAPAAFKYFDTTIDR
KRYTSTKEVLDATLIHQSITGLYETRIDLSQLGGDGGSGGSGGSG
GSGGSGGSGGMDKKYSIGLAIGTNSVGWAVITDEYKVPSKKFKVL
GNTDRHSIKKNLIGALLFDSGETAEATRLKRTARRRYTRRKNRIC
YLQEIFSNEMAKVDDSFFHRLEESFLVEEDKKHERHPIFGNIVDE
VAYHEKYPTIYHLRKKLVDSTDKADLRLIYLALAHMIKFRGHFLI
EGDLNPDNSDVDKLFIQLVQTYNQLFEENPINASGVDAKAILSAR
LSKSRRLENLIAQLPGEKKNGLFGNLIALSLGLTPNFKSNFDLAE
DAKLQLSKDTYDDDLDNLLAQIGDQYADLFLAAKNLSDAILLSDI
LRVNTEITKAPLSASMIKRYDEHHQDLTLLKALVRQQLPEKYKEI
FFDQSKNGYAGYIDGGASQEEFYKFIKPILEKMDGTEELLVKLNR
EDLLRKQRTFDNGSIPHQIHLGELHAILRRQEDFYPFLKDNREKI
EKILTFRIPYYVGPLARGNSRFAWMTRKSEETITPWNFEEVVDKG
ASAQSFIERMTNFDKNLPNEKVLPKHSLLYEYFTVYNELTKVKYV
TEGMRKPAFLSGEQKKAIVDLLFKTNRKVTVKQLKEDYFKKIECF
DSVEISGVEDRFNASLGTYHDLLKIIKDKDFLDNEENEDILEDIV
LTLTLFEDREMIEERLKTYAHLFDDKVMKQLKRRRYTGWGRLSRK
LINGIRDKQSGKTILDFLKSDGFANRNFMQLIHDDSLTFKEDIQK
AQVSGQGDSLHEHIANLAGSPAIKKGILQTVKWDELVKVMGRHKP
ENIVIEMARENQTTQKGQKNSRERMKRIEEGIKELGSQILKEHPV
ENTQLQNEKLYLYYLQNGRDMYVDQELDINRLSDYDVDHIVPQSF
LKDDSIDNKVLTRSDKNRGKSDNVPSEEWKKMKNYWRQLLNAKLI
TQRKFDNLTKAERGGLSELDKAGFIKRQLVETRQITKHVAQILDS
RMNTKYDENDKLIREVKVITLKSKLVSDFRKDFQFYKVREINNYH
HAHDAYLNAWGTALIKKYPKLESEFVYGDYKVYDVRKMIAKSEQ
SGGSKRTADGSEFEPKKKRKV
ABE8e-CP1028 monomer editor: NLS, linker,
TadA*, CP 1028
(SEQ ID NO: 216)
MKRTADGSEFESPKKKRKVSEVEFSHEYWMRHALTLAKRARDERE
VPVGAVLVLNNRVIGEGWNRAIGLHDPTAHAEIMALRQGGLVMQN
YRLIDATLYVTFEPCVMCAGAMIHSRIGRVVFGVRNSKRGAAGSL
MNVLNYPGMNHRVEITEGILADECAALLCDFYRMPRQVFNAQKKA
QSSINSGGSSGGSSGSETPGTSESATPESSGGSSGGSEIGKATAK
YFFYSNIMNFFKTEITLANGEIRKRPLIETNGE
TGEIVWDKGRDFATVRKVLSMPQVNIVKKTEVQTGGFSKESILPK
RNSDKLIARKKDWDPKKYGGFDSPTVAYSVLVVAKVEKGKSKKLK
SVKELLGITIMERSSFEKNPIDFLEAKGYKEVKKDLIKLPKYSLF
ELENGRKRMLASAGELQKGNELALPSKYVNFLYLASHYEKLKGSP
EDNEQKQLFVEQHKHYLDEHIEQISEFSKRVILADANLDKVLSAY
NKHRDKPIREQAENIIHLFTLTNLGAPAAFKYFDTTIDRKRYTST
KEVLDATLIHQSITGLYETRIDLSQLGGDGGSGGSGGSGGSGGSG
GSGGMDKKYSIGLAIGTNSVGWAVITDEYKVPSKKFKVLGNTDRH
SIKKNLIGALLFDSGETAEATRLKRTARRRYTRRKNRICYLQEIF
SNEMAKVDDSFFHRLEESFLVEEDKKHERHPIFGNIVDEVAYHEK
YPTIYHLRKKLVDSTDKADLRLIYLALAHMIKFRGHFLIEGDLNP
DNSDVDKLFIQLVQTYNQLFEENPINASGVDAKAILSARLSKSRR
LENLIAQLPGEKKNGLFGNLIALSLGLTPNFKSNFDLAEDAKLQL
SKDTYDDDLDNLLAQIGDQYADLFLAAKNLSDAILLSDILRVNTE
ITKAPLSASMIKRYDEHHQDLTLLKALVRQQLPEKYKEIFFDQSK
NGYAGYIDGGASQEEFYKFIKPILEKMDGTEELLVKLNREDLLRK
QRTFDNGSIPHQIHLGELHAILRRQEDFYPFLKDNREKIEKILTF
RIPYYVGPLARGNSRFAWMTRKSEETITPWNFEEVVDKGASAQSF
IERMTNFDKNLPNEKVLPKHSLLYEYFTVYNELTKVKYVTEGMRK
PAFLSGEQKKAIVDLLFKTNRKVTVKQLKEDYFKKIECFDSVEIS
GVEDRFNASLGTYHDLLKIIKDKDFLDNEENEDILEDIVLTLTLF
EDREMIEERLKTYAHLFDDKVMKQLKRRRYTGWGRLSRKLINGIR
DKQSGKTILDFLKSDGFANRNFMQLIHDDSLTFKEDIQKAQVSGQ
GDSLHEHIANLAGSPAIKKGILQTVKVVDELVKVMGRHKPENIVI
EMARENQTTQKGQKNSRERMKRIEEGIKELGSQILKEHPVENTQL
QNEKLYLYYLQNGRDMYVDQELDINRLSDYDVDHIVPQSFLKDDS
IDNKVLTRSDKNRGKSDNVPSEEVVKKMKNYWRQLLNAKLITQRK
FDNLTKAERGGLSELDKAGFIKRQLVETRQITKHVAQILDSRMNT
KYDENDKLIREVKVITLKSKLVSDFRKDFQFYKVREINNYHHAHD
AYLNAVVGTALIKKYPKLESEFVYGDYKVYDVRKMIAKSEQSGGS
KRTADGSEFEPKKKRKV
ABE8e-VRQR dimer editor: NLS, wtTadA,
linker, TadA*, SpCas9-VRQR
(SEQ ID NO: 3253)
MKRTADGSEFESPKKKRKVSEVEFSHEYWMRHALTLAKRAWDERE
VPVGAVLVHNNRVIGEGWNRPIGRHDPTAHAEIMALRQGGLVMQN
YRLIDATLYVTLEPCVMCAGAMIHSRIGRVVFGARDAKTGAAGSL
MDVLHHPGMNHRVEITEGILADECAALLSDFFRMRRQEIKAQKKA
QSSTDSGGSSGGSSGSETPGTSESATPESSGGSSGGSSEVEFSHE
YWMRHALTLAKRARDEREVPVGAVLVLNNRVIGEGWNRAIGLHDP
TAHAEIMALRQGGLVMQNYRLIDATLYVTFEPCVMCAGAMIHSRI
GRVVFGVRNSKRGAAGSEMNVLNYPGMNHRVEITEGILADECAAL
LCDFYRMPRQVFNAQKKAQSSINSGGSSGGSSGSETPGTSESATP
ESSGGSSGGSDKKYSIGLAIGTNSVGWAVITDEYKVPSKKFKVLG
NTDRHSIKKNLIGALLFDSGETAEATRLKRTARRRYTRRKNRICY
LQEIFSNEMAKVDDSFFHRLEESFLVEEDKKHERHPIFGNIVDEV
AYHEKYPTIYHLRKKLVDSTDKADLRLIYLALAHMIKFRGHFLIE
GDLNPDNSDVDKLFIQLVQTYNQLFEENPINASGVDAKAILSARL
SKSRRLENLIAQLPGEKKNGLFGNLIALSLGLTPNFKSNFDLAED
AKLQLSKDTYDDDLDNLLAQIGDQYADLFLAAKNLSDAILLSDIL
RVNTEITKAPLSASMIKRYDEHHQDLTLLKALVRQQLPEKYKEIF
FDQSKNGYAGYIDGGASQEEFYKFIKPILEKMDGTEELLVKLNRE
DLLRKQRTFDNGSIPHQIHLGELHAILRRQEDFYPFLKDNREKIE
KILTFRIPYYVGPLARGNSRFAWMTRKSEETITPWNFEEVVDKGA
SAQSFIERMTNFDKNLPNEKVLPKHSLLYEYFTVYNELTKVKYVT
EGMRKPAFLSGEQKKAIVDLLFKTNRKVTVKQLKEDYFKKIECFD
SVEISGVEDRFNASLGTYHDLLKIIKDKDFLDNEENEDILEDIVL
TLTLFEDREMIEERLKTYAHLFDDKVMKQLKRRRYTGWGRLSRKL
INGIRDKQSGKTILDFLKSDGFANRNFMQLIHDDSLTFKEDIQKA
QVSGQGDSLHEHIANLAGSPAIKKGILQTVKWDELVKVMGRHKPE
NIVIEMARENQTTQKGQKNSRERMKRIEEGIKELGSQILKEHPVE
NTQLQNEKLYLYYLQNGRDMYVDQELDINRLSDYDVDHIVPQSFL
KDDSIDNKVLTRSDKNRGKSDNVPSEEWKKMKNYWRQLLNAKLIT
QRKFDNLTKAERGGLSELDKAGFIKRQLVETRQITKHVAQILDSR
MNTKYDENDKLIREVKVITLKSKLVSDFRKDFQFYKVREINNYHH
AHDAYLNAWGTALIKKYPKLESEFVYGDYKVYDVRKMIAKSEQEI
GKATAKYFFYSNIMNFFKTEITLANGEIRKRPLIETNGETGEIVW
DKGRDFATVRKVLSMPQVNIVKKTEVQTGGFSKESILPKRNSDKL
IARKKDWDPKKYGGFVSPTVAYSVLVVAKVEKGKSKKLKSVKELL
GITIMERSSFEKNPIDFLEAKGYKEVKKDLIIKLPKYSLFELENG
RKRMLASARELQKGNELALPSKYVNFLYLASHYEKLKGSPEDNEQ
KQLFVEQHKHYLDEIIEQISEFSKRVILADANLDKVLSAYNKHRD
KPIREQAENIIHLFTLTNLGAPAAFKYFDTTIDRKQYRSTKEVLD
ATLIHQSITGLYETRIDLSQLGGDSGGSKRTADGSEFEPKKKRKV
ABE8e-VRQR monomer editor: NLS, linker,
TadA*, SpCas9-VRQR
(SEQ ID NO: 3254)
MKRTADGSEFESPKKKRKVSEVEFSHEYWMRHALTLAKRARDERE
VPVGAVLVLNNRVIGEGWNRAIGLHDPTAHAEIMALRQGGLVMQN
YRLIDATLYVTFEPCVMCAGAMIHSRIGRVVFGVRNSKRGAAGSL
MNVLNYPGMNHRVEITEGILADECAALLCDFYRMPRQVFNAQKKA
QSSINSGGSSGGSSGSETPGTSESATPESSGGSSGGSDKKYSIGL
AIGTNSVGWAVITDEYKVPSKKFKVLGNTDRHSIKKNLIGALLFD
SGETAEATRLKRTARRRYTRRKNRICYLQEIFSNEMAKVDDSFFH
RLEESFLVEEDKKHERHPIFGNIVDEVAYHEKYPTIYHLRKKLVD
STDKADLRLIYLALAHMIKFRGHFLIEGDLNPDNSDVDKLFIQLV
QTYNQLFEENPINASGVDAKAILSARLSKSRRLENLIAQLPGEKK
NGLFGNLIALSLGLTPNFKSNFDLAEDAKLQLSKDTYDDDLDNLL
AQIGDQYADLFLAAKNLSDAILLSDILRVNTEITKAPLSASMIKR
YDEHHQDLTLLKALVRQQLPEKYKEIFFDQSKNGYAGYIDGGASQ
EEFYKFIKPILEKMDGTEELLVKLNREDLLRKQRTFDNGSIPHQI
HLGELHAILRRQEDFYPFLKDNREKIEKILTFRIPYYVGPLARGN
SRFAWMTRKSEETITPWNFEEVVDKGASAQSFIERMTNFDKNLPN
EKVLPKHSLLYEYFTVYNELTKVKYVTEGMRKPAFLSGEQKKAIV
DLLFKTNRKVTVKQLKEDYFKKIECFDSVEISGVEDRFNASLGTY
HDLLKIIKDKDFLDNEENEDILEDIVLTLTLFEDREMIEERLKTY
AHLFDDKVMKQLKRRRYTGWGRLSRKLINGIRDKQSGKTILDFLK
SDGFANRNFMQLIHDDSLTFKEDIQKAQVSGQGDSLHEHIANLAG
SPAIKKGILQTVKVVDELVKVMGRHKPENIVIEMARENQTTQKGQ
KNSRERMKRIEEGIKELGSQILKEHPVENTQLQNEKLYLYYLQNG
RDMYVDQELDINRLSDYDVDHIVPQSFLKDDSIDNKVLTRSDKNR
GKSDNVPSEEVVKKMKNYWRQLLNAKLITQRKFDNLTKAERGGLS
ELDKAGFIKRQLVETRQITKHVAQILDSRMNTKYDENDKLIREVK
VITLKSKLVSDFRKDFQFYKVREINNYHHAHDAYLNAVVGTALIK
KYPKLESEFVYGDYKVYDVRKMIAKSEQEIGKATAKYFFYSNIMN
FFKTEITLANGEIRKRPLIETNGETGEIVWDKGRDFATVRKVLSM
PQVNIVKKTEVQTGGFSKESILPKRNSDKLIARKKDWDPKKYGGF
VSPTVAYSVLVVAKVEKGKSKKLKSVKELLGITIMERSSFEKNPI
DFLEAKGYKEVKKDLIIKLPKYSLFELENGRKRMLASARELQKGN
ELALPSKYVNFLYLASHYEKLKGSPEDNEQKQLFVEQHKHYLDEI
IEQISEFSKRVILADANLDKVLSAYNKHRDKPIREQAENIIHLFT
LTNLGAPAAFKYFDTTIDRKQYRSTKEVLDATLIHQSITGLYETR
IDLSQLGGDSGGSKRTADGSEFEPKKKRKV
ABE8e-NG-CP1041 dimer editor: NLS, wtTadA,
linker, TadA*, SpCas9-NG-
CP1041
(SEQ ID NO: 3244)
MKRTADGSEFESPKKKRKVSEVEFSHEYWMRHALTLAKRAWDERE
VPVGAVLVHNNRVIGEGWNRPIGRHDPTAHAEIMALRQGGLVMQN
YRLIDATLYVTLEPCVMCAGAMIHSRIGRVVFGARDAKTGAAGSL
MDVLHHPGMNHRVEITEGILADECAALLSDFFRMRRQEIKAQKKA
QSSTDSGGSSGGSSGSETPGTSESATPESSGGSSGGSSEVEFSHE
YWMRHALTLAKRARDEREVPVGAVLVLNNRVIGEGWNRAIGLHDP
TAHAEIMALRQGGLVMQNYRLIDATLYVTFEPCVMCAGAMIHSRI
GRVVFGVRNSKRGAAGSEMNVLNYPGMNHRVEITEGILADECAAL
LCDFYRMPRQVFNAQKKAQSSINSGGSSGGSSGSETPGESESATP
ESSGGSSGGSNIMNFFKTEITLANGEIRKRPLIETNGETGEIVWD
KGRDFATVRKVLSMPQVNIVKKTEVQTGGFSKESIRPKRNSDKLI
ARKKDWDPKKYGGFVSPTVAYSVLVVAKVEKGKSKKLKSVKELLG
ITIMERSSFEKNPIDFLEAKGYKEVKKDLIIKLPKYSLFELENGR
KRMLASARFLQKGNELALPSKYVNFLYLASHYEKLKGSPEDNEQK
QLFVEQHKHYLDEIIEQISEFSKRVILADANLDKVLSAYNKHRDK
PIREQAENIIHLFTLTNLGAPRAFKYFDTTIDRKVYRSTKEVLDA
TLIHQSITGLYETRIDLSQLGGDGGSGGSGGSGGSGGSGGSGGDK
KYSIGLAIGTNSVGWAVITDEYKVPSKKFKVLGNTDRHSIKKNLI
GALLFDSGETAEATRLKRTARRRYTRRKNRICYLQEIFSNEMAKV
DDSFFHRLEESFLVEEDKKHERHPIFGNIVDEVAYHEKYPTIYHL
RKKLVDSTDKADLRLIYLALAHMIKFRGHFLIEGDLNPDNSDVDK
LFIQLVQTYNQLFEENPINASGVDAKAILSARLSKSRRLENLIAQ
LPGEKKNGLFGNLIALSLGLTPNFKSNFDLAEDAKLQLSKDTYDD
DLDNLLAQIGDQYADLFLAAKNLSDAILLSDILRVNTEITKAPLS
ASMIKRYDEHHQDLTLLKALVRQQLPEKYKEIFFDQSKNGYAGYI
DGGASQEEFYKFIKPILEKMDGTEELLVKLNREDLLRKQRTFDNG
SIPHQIHLGELHAILRRQEDFYPFLKDNREKIEKILTFRIPYYVG
PLARGNSRFAWMTRKSEETITPWNFEEVVDKGASAQSFIERMTNF
DKNLPNEKVLPKHSLLYEYFTVYNELTKVKYVTEGMRKPAFLSGE
QKKAIVDLLFKTNRKVTVKQLKEDYFKKIECFDSVEISGVEDRFN
ASLGTYHDLLKIIKDKDFLDNEENEDILEDIVLTLTLFEDREMIE
ERLKTYAHLFDDKVMKQLKRRRYTGWGRLSRKLINGIRDKQSGKT
ILDFLKSDGFANRNFMQLIHDDSLTFKEDIQKAQVSGQGDSLHEH
IANLAGSPAIKKGILQTVKWDELVKVMGRHKPENIVIEMARENQT
TQKGQKNSRERMKRIEEGIKELGSQILKEHPVENTQLQNEKLYLY
YLQNGRDMYVDQELDINRLSDYDVDHIVPQSFLKDDSIDNKVLTR
SDKNRGKSDNVPSEEWKKMKNYWRQLLNAKLITQRKFDNLTKAER
GGLSELDKAGFIKRQLVETRQITKHVAQILDSRMNTKYDENDKLI
REVKVITLKSKLVSDFRKDFQFYKVREINNYHHAHDAYLNAWGTA
LIKKYPKLESEFVYGDYKVYDVRKMIAKSEQEIGKATAKYFFYSS
GGSKRTADGSEFEPKKKRKV
ABE8e-NG-CP1041 monomer editor: NLS,
linker, TadA*, SpCas9-NG-CP1041
(SEQ ID NO: 3245)
MKRTADGSEFESPKKKRKVSEVEFSHEYWMRHALTLAKRARDERE
VPVGAVLVLNNRVIGEGWNRAIGLHDPTAHAEIMALRQGGLVMQN
YRLIDATLYVTFEPCVMCAGAMIHSRIGRVVFGVRNSKRGAAGSL
MNVLNYPGMNHRVEITEGILADECAALLCDFYRMPRQVFNAQKKA
QSSINSGGSSGGSSGSETPGTSESATPESSGGSSGGSNIMNFFKT
EITLANGEIRKRPLIETNGETGEIVWDKGRDFATVRKVLSMPQVN
IVKKTEVQTGGFSKESIRPKRNSDKLIARKKDWDPKKYGGFVSPT
VAYSVLVVAKVEKGKSKKLKSVKELLGITIMERSSFEKNPIDFLE
AKGYKEVKKDLIIKLPKYSLFELENGRKRMLASARFLQKGNELAL
PSKYVNFLYLASHYEKLKGSPEDNEQKQLFVEQHKHYLDEIIEQI
SEFSKRVILADANLDKVLSAYNKHRDKPIREQAENIIHLFTLTNL
GAPRAFKYFDTTIDRKVYRSTKEVLDATLIHQSITGLYETRIDLS
QLGGDGGSGGSGGSGGSGGSGGSGGDKKYSIGLAIGTNSVGWAVI
TDEYKVPSKKFKVLGNTDRHSIKKNLIGALLFDSGETAEATRLKR
TARRRYTRRKNRICYLQEIFSNEMAKVDDSFFHRLEESFLVEEDK
KHERHPIFGNIVDEVAYHEKYPTIYHLRKKLVDSTDKADLRLIYL
ALAHMIKFRGHFLIEGDLNPDNSDVDKLFIQLVQTYNQLFEENPI
NASGVDAKAILSARLSKSRRLENLIAQLPGEKKNGLFGNLIALSL
GLTPNFKSNFDLAEDAKLQLSKDTYDDDLDNLLAQIGDQYADLFL
AAKNLSDAILLSDILRVNTEITKAPLSASMIKRYDEHHQDLTLLK
ALVRQQLPEKYKEIFFDQSKNGYAGYIDGGASQEEFYKFIKPILE
KMDGTEELLVKLNREDLLRKQRTFDNGSIPHQIHLGELHAILRRQ
EDFYPFLKDNREKIEKILTFRIPYYVGPLARGNSRFAWMTRKSEE
TITPWNFEEVVDKGASAQSFIERMTNFDKNLPNEKVLPKHSLLYE
YFTVYNELTKVKYVTEGMRKPAFLSGEQKKAIVDLLFKTNRKVTV
KQLKEDYFKKIECFDSVEISGVEDRFNASLGTYHDLLKIIKDKDF
LDNEENEDILEDIVLTLTLFEDREMIEERLKTYAHLFDDKVMKQL
KRRRYTGWGRLSRKLINGIRDKQSGKTILDFLKSDGFANRNFMQL
IHDDSLTFKEDIQKAQVSGQGDSLHEHIANLAGSPAIKKGILQTV
KVVDELVKVMGRHKPENIVIEMARENQTTQKGQKNSRERMKRIEE
GIKELGSQILKEHPVENTQLQNEKLYLYYLQNGRDMYVDQELDIN
RLSDYDVDHIVPQSFLKDDSIDNKVLTRSDKNRGKSDNVPSEEVV
KKMKNYWRQLLNAKLITQRKFDNLTKAERGGLSELDKAGFIKRQL
VETRQITKHVAQILDSRMNTKYDENDKLIREVKVITLKSKLVSDF
RKDFQFYKVREINNYHHAHDAYLNAVVGTALIKKYPKLESEFVYG
DYKVYDVRKMIAKSEQEIGKATAKYFFYSSGGSKRTADGSEFEPK
KKRKV
ABE8e-iSpyMac dimer editor: NLS, wtTadA,
linker, TadA*, SpCas9-iSpyMac
(SEQ ID NO: 3255)
MKRTADGSEFESPKKKRKVSEVEFSHEYWMRHALTLAKRAWDERE
VPVGAVLVHNNRVIGEGWNRPIGRHDPTAHAEIMALRQGGLVMQN
YRLIDATLYVTLEPCVMCAGAMIHSRIGRVVFGARDAKTGAAGSL
MDVLHHPGMNHRVEITEGILADECAALLSDFFRMRRQEIKAQKKA
QSSTDSGGSSGGSSGSETPGTSESATPESSGGSSGGSSEVEFSHE
YWMRHALTLAKRARDEREVPVGAVLVLNNRVIGEGWNRAIGLHDP
TAHAEIMALRQGGLVMQNYRLIDATLYVTFEPCVMCAGAMIHSRI
GRVVFGVRNSKRGAAGSEMNVLNYPGMNHRVEITEGILADECAAL
LCDFYRMPRQVFNAQKKAQSSINSGGSSGGSSGSETPGTSESATP
ESSGGSSGGSDKKYSIGLDIGTNSVGWAVITDEYKVPSKKFKVLG
NTDRHSIKKNLIGALLFDSGETAEATRLKRTARRRYTRRKNRICY
LQEIFSNEMAKVDDSFFHRLEESFLVEEDKKHERHPIFGNIVDEV
AYHEKYPTIYHLRKKLVDSTDKADLRLIYLALAHMIKFRGHFLIE
GDLNPDNSDVDKLFIQLVQTYNQLFEENPINASGVDAKAILSARL
SKSRRLENLIAQLPGEKKNGLFGNLIALSLGLTPNFKSNFDLAED
AKLQLSKDTYDDDLDNLLAQIGDQYADLFLAAKNLSDAILLSDIL
RVNTEITKAPLSASMIKRYDEHHQDLTLLKALVRQQLPEKYKEIF
FDQSKNGYAGYIDGGASQEEFYKFIKPILEKMDGTEELLVKLNRE
DLLRKQRTFDNGSIPHQIHLGELHAILRRQEDFYPFLKDNREKIE
KILTFRIPYYVGPLARGNSRFAWMTRKSEETITPWNFEEVVDKGA
SAQSFIERMTNFDKNLPNEKVLPKHSLLYEYFTVYNELTKVKYVT
EGMRKPAFLSGEQKKAIVDLLFKTNRKVTVKQLKEDYFKKIECFD
SVEISGVEDRFNASLGTYHDLLKIIKDKDFLDNEENEDILEDIVL
TLTLFEDREMIEERLKTYAHLFDDKVMKQLKRRRYTGWGRLSRKL
INGIRDKQSGKTILDFLKSDGFANRNFMQLIHDDSLTFKEDIQKA
QVSGQGDSLHEHIANLAGSPAIKKGILQTVKWDELVKVMGRHKPE
NIVIEMARENQTTQKGQKNSRERMKRIEEGIKELGSQILKEHPVE
NTQLQNEKLYLYYLQNGRDMYVDQELDINRLSDYDVDHIVPQSFL
KDDSIDNKVLTRSDKNRGKSDNVPSEEWKKMKNYWRQLLNAKLIT
QRKFDNLTKAERGGLSELDKAGFIKRQLVETRQITKHVAQILDSR
MNTKYDENDKLIREVKVITLKSKLVSDFRKDFQFYKVREINNYHH
AHDAYLNAWGTALIKKYPKLESEFVYGDYKVYDVRKMIAKSEQEI
GKATAKYFFYSNIMNFFKTEITLANGEIRKRPLIETNGETGEIVW
DKGRDFATVRKVLSMPQVNIVKKTESGGSKRTADGSEFEPKKKRK
V
ABE8e-iSpyMac monomer editor: NLS, linker,
TadA*, SpCas9-iSpyMac
(SEQ ID NO: 3256)
MKRTADGSEFESPKKKRKVSEVEFSHEYWMRHALTLAKRARDERE
VPVGAVLVLNNRVIGEGWNRAIGLHDPTAHAEIMALRQGGLVMQN
YRLIDATLYVTFEPCVMCAGAMIHSRIGRVVFGVRNSKRGAAGSL
MNVLNYPGMNHRVEITEGILADECAALLCDFYRMPRQVFNAQKKA
QSSINSGGSSGGSSGSETPGTSESATPESSGGSSGGSDKKYSIGL
DIGTNSVGWAVITDEYKVPSKKFKVLGNTDRHSIKKNLIGALLFD
SGETAEATRLKRTARRRYTRRKNRICYLQEIFSNEMAKVDDSFFH
RLEESFLVEEDKKHERHPIFGNIVDEVAYHEKYPTIYHLRKKLVD
STDKADLRLIYLALAHMIKFRGHFLIEGDLNPDNSDVDKLFIQLV
QTYNQLFEENPINASGVDAKAILSARLSKSRRLENLIAQLPGEKK
NGLFGNLIALSLGLTPNFKSNFDLAEDAKLQLSKDTYDDDLDNLL
AQIGDQYADLFLAAKNLSDAILLSDILRVNTEITKAPLSASMIKR
YDEHHQDLTLLKALVRQQLPEKYKEIFFDQSKNGYAGYIDGGASQ
EEFYKFIKPILEKMDGTEELLVKLNREDLLRKQRTFDNGSIPHQI
HLGELHAILRRQEDFYPFLKDNREKIEKILTFRIPYYVGPLARGN
SRFAWMTRKSEETITPWNFEEVVDKGASAQSFIERMTNFDKNLPN
EKVLPKHSLLYEYFTVYNELTKVKYVTEGMRKPAFLSGEQKKAIV
DLLFKTNRKVTVKQLKEDYFKKIECFDSVEISGVEDRFNASLGTY
HDLLKIIKDKDFLDNEENEDILEDIVLTLTLFEDREMIEERLKTY
AHLFDDKVMKQLKRRRYTGWGRLSRKLINGIRDKQSGKTILDFLK
SDGFANRNFMQLIHDDSLTFKEDIQKAQVSGQGDSLHEHIANLAG
SPAIKKGILQTVKVVDELVKVMGRHKPENIVIEMARENQTTQKGQ
KNSRERMKRIEEGIKELGSQILKEHPVENTQLQNEKLYLYYLQNG
RDMYVDQELDINRLSDYDVDHIVPQSFLKDDSIDNKVLTRSDKNR
GKSDNVPSEEVVKKMKNYWRQLLNAKLITQRKFDNLTKAERGGLS
ELDKAGFIKRQLVETRQITKHVAQILDSRMNTKYDENDKLIREVK
VITLKSKLVSDFRKDFQFYKVREINNYHHAHDAYLNAVVGTALIK
KYPKLESEFVYGDYKVYDVRKMIAKSEQEIGKATAKYFFYSNIMN
FFKTEITLANGEIRKRPLIETNGETGEIVWDKGRDFATVRKVLSM
PQVNIVKKTESGGSKRTADGSEFEPKKKRKV

### Additional Exemplary CBEs

[0616] In various embodiments, the present disclosure provides novel cytosine base editors (CBEs) comprising a napDNAbp domain and a cytosine deaminase domain that enzymatically deaminates a cytosine nucleobase of a C:G nucleobase pair to a uracil. The uracil may be subsequently converted to a thymine (T) by the cell's DNA repair and replication machinery. The mismatched guanine (G) on the opposite strand may subsequently be converted to an adenine (A) by the cell's DNA repair and replication machinery. In this manner, a target C:G nucleobase pair is ultimately converted to a T:A nucleobase pair.

[0617] The disclosed novel cytosine base editors exhibit increased on-target editing scope while maintaining minimized off-target DNA editing relative to existing CBEs. The CBEs described herein provide ˜10- to ˜100-fold lower average Cas9-independent off-target DNA editing, while maintaining efficient on-target editing at most positions targetable by existing CBEs. The disclosed CBEs comprise combinations of mutant cytosine deaminases, such as the YE1, YE2, YEE, and R33A deaminases, and Cas9 domains, and/or novel combinations of mutant cytosine deaminases, Cas9 domains, uracil glycosylase inhibitor (UGI) domains and nuclear localizations sequence (NLS) domains, relative to existing base editors. Existing base editors include BE3, which comprises the structure NH₂-[NLS]-[rAPOBEC1 deaminase]-[Cas9 nickase (D10A)]-[UGI domain]-[NLS]-COOH; BE4, which comprises the structure NH₂-[NLS]-[rAPOBEC1 deaminase]-[Cas9 nickase (D10A)]-[UGI domain]-[UGI domain]-[NLS]-COOH; and BE4max, which is a version of BE4 for which the codons of the base editor-encoding construct has been codon-optimized for expression in human cells.

[0618] Zuo et al. recently reported that, when overexpressed in mouse embryos and rice, BE3, the original CBE, induces an average random C:G-to-T:A mutation frequency of 5×10⁻⁸ per bp and 1.7×10⁻³ per bp, respectively. See “Cytosine base editor generates substantial off-target single-nucleotide variants in mouse embryos.” Science 364, 289-292 (2019), herein incorporated by reference. Editing was observed in sequences that had little to no similarity to the target sequences. These off-target edits may have arisen from the intrinsic DNA affinity of BE3's deaminase domain, independent of the guide RNA-programmed DNA binding of Cas9. See also Jin et al., Cytosine, but not adenine, base editors induce genome-wide off-target mutations in rice. Science 364, (2019), herein incorporated by reference.

[0619] Zuo et al. also found that Cas9-independent off-target editing events were enriched in transcribed regions of the genome, particularly in highly-expressed genes. Some of these were tumor suppressor genes. Accordingly, there is a need in the art to develop base editors that possess low off-target editing frequencies that may avoid undesired activation or inactivation of genes associated with diseases or disorders, such as cancer, and assays that rapidly measure the off-target editing frequencies of these base editors.

[0620] Exemplary CBEs may provide an off-target editing frequency of less than 2.0% after being contacted with a nucleic acid molecule comprising a target sequence, e.g., a target nucleobase pair. Further exemplary CBEs provide an off-target editing frequency of less than 1.5% after being contacted with a nucleic acid molecule comprising a target sequence comprising a target nucleobase pair. Further exemplary CBEs may provide an off-target editing frequency of less than 1.25%, less than 1.1%, less than 1%, less than 0.75%, less than 0.5%, less than 0.4%, less than 0.25%, less than 0.2%, less than 0.15%, less than 0.1%, less than 0.05%, or less than 0.025%, after being contacted with a nucleic acid molecule comprising a target sequence.

[0621] For instance, the cytosine base editors YE1-BE4, YE1-CP1028, YE1-SpCas9-NG (also referred to herein as YE1-NG), R33A-BE4, and R33A+K34A-BE4-CP1028, which are described below, may exhibit off-target editing frequencies of less than 0.75% (e.g., about 0.4% or less) while maintaining on-target editing efficiencies of about 60% or more, in target sequences in mammalian cells. Each of these base editors comprises modified cytosine deaminases (e.g., YE1, R33A, or R33A+K34A) and may further comprise a modified napDNAbp domain such as a circularly permuted Cas9 domain (e.g., CP1028) or a Cas9 domain with an expanded PAM window (e.g., SpCas9-NG). These five base editors may be the most preferred for applications in which off-target editing, and in particular Cas9-independent off-target editing, must be minimized. In particular, base editors comprising a YE1 deaminase domain provide efficient on-target editing with greatly decreased Cas9-independent editing, as confirmed by whole-genome sequencing.

[0622] Exemplary CBEs may further possess an on-target editing efficiency of more than 50% after being contacted with a nucleic acid molecule comprising a target sequence. Further exemplary CBEs possess an on-target editing efficiency of more than 60% after being contacted with a nucleic acid molecule comprising a target sequence. Further exemplary CBEs possess an on-target editing efficiency of more than 65%, more than 70%, more than 75%, more than 80%, more than 82.5%, or more than 85% after being contacted with a nucleic acid molecule comprising a target sequence.

[0623] The disclosed CBEs may exhibit indel frequencies of less than 0.75%, less than 0.6%, less than 0.5%, less than 0.4%, less than 0.3%, or less than 0.2% after being contacted with a nucleic acid molecule containing a target sequence. The disclosed CBEs may further exhibit reduced RNA off-target editing relative to existing CBEs. The disclosed CBEs may further result in increased product purity after being contacted with a nucleic acid molecule containing a target sequence relative to existing CBEs.

[0624] The disclosed CBEs may further comprise one or more nuclear localization signals (NLSs) and/or two or more uracil glycosylase inhibitor (UGI) domains. Thus, the base editors may comprise the structure: NH₂-[first nuclear localization sequence]-[cytosine deaminase domain]-[napDNAbp domain]-[first UGI domain]-[second UGI domain]-[second nuclear localization sequence]-COOH, wherein each instance of “]-[” indicates the presence of an optional linker sequence. Exemplary CBEs may have a structure that comprises the “BE4max” architecture, with an NH₂-[NLS]-[cytosine deaminase]-[Cas9 nickase]-[UGI domain]-[UGI domain]-[NLS]-COOH structure, having optimized nuclear localization signals and wherein the napDNAbp domain comprises a Cas9 nickase. This BE4max structure was reported to have optimized codon usage for expression in human cells, as reported in Koblan et al., Nat Biotechnol. 2018; 36(9):843-846, herein incorporated by reference.

[0625] In other embodiments, exemplary CBEs may have a structure that comprises a modified BE4max architecture that contains a napDNAbp domain comprising a Cas9 variant other than Cas9 nickase, such as SpCas9-NG, xCas9, or circular permutant CP1028. Accordingly, exemplary CBEs may comprise the structure: NH₂-[NLS]-[cytosine deaminase]-[CP1028]-[UGI domain]-[UGI domain]-[NLS]-COOH; NH₂-[NLS]-[cytosine deaminase]-[xCas9]-[UGI domain]-[UGI domain]-[NLS]-COOH; or NH₂-[NLS]-[cytosine deaminase]-[SpCas9-NG]-[UGI domain]-[UGI domain]-[NLS]-COOH, wherein each instance of “]-[” indicates the presence of an optional linker sequence.

[0626] The disclosed CBEs may comprise modified (or evolved) cytosine deaminase domains, such as deaminase domains that recognize an expanded PAM sequence, have improved efficiency of deaminating 5′-GC targets, and/or make edits in a narrower target window. In some embodiments, the disclosed cytosine base editors comprise evolved nucleic acid programmable DNA binding proteins (napDNAbp), such as an evolved Cas9.

[0627] Exemplary cytosine base editors comprise sequences that are at least 85%, at least 90%, at least 95%, at least 98%, at least 99%, or at least 99.5% identical to the following amino acid sequences, SEQ ID NOs: 223-248.

[0628] Where indicated, “—BE4” refers to the BE4max architecture, or NH₂-[first nuclear localization sequence]-[cytosine deaminase domain]-[32aa linker]-[SpCas9 nickase (nCas9, or nSpCas9) domain]-[9aa linker]-[first UGI domain]-[9aa-linker]-[second UGI domain]-[second nuclear localization sequence]-COOH. Where indicated, “BE4max, modified with SpCas9-NG” and “—SpCas9-NG” refer to a modified BE4max architecture in which the SpCas9 nickase domain has been replaced with an SpCas9-NG, i.e., NH₂-[first nuclear localization sequence]-[cytosine deaminase domain]-[32aa linker]-[SpCas9-NG]-[9aa linker]-[first UGI domain]-[9aa-linker]-[second UGI domain]-[second nuclear localization sequence]-COOH. And where indicated, “BE4-CP1028” refers to a modified BE4max architecture in which the Cas9 nickase domain has been replaced with a S. pyogenes CP1028, i.e., NH₂-[first nuclear localization sequence]-[cytosine deaminase domain]-[32aa linker]-[CP1028]-[9aa linker]-[first UGI domain]-[9aa-linker]-[second UGI domain]-[second nuclear localization sequence]-COOH.

[0629] As discussed above, preferred base editors comprise modified cytosine deaminases (e.g., YE1, R33A, or R33A+K34A) and may further comprise a modified napDNAbp domain such as a circularly permuted Cas9 domain (e.g., CP1028) or a Cas9 domain with an expanded PAM window (e.g., SpCas9-NG). The napDNAbp domains in the following amino acid sequences are indicated in italics.

BE4max
(SEQ ID NO: 223)
MKRTADGSEFESPKKKRKVSSETGPVAVDPTLRRRIEPHEFEVFFDPRELRKETCLLY
EINWGGRHSIWRHTSQNTNKHVEVNFIEKFTTERYFCPNTRCSITWFLSWSPCGECSR
AITEFLSRYPHVTLFIYIARLYHHADPRNRQGLRDLISSGVTIQIMTEQESGYCWRNFV
NYSPSNEAHWPRYPHLWVRLYVLELYCIILGLPPCLNILRRKQPQLTFFTIALQSCHY
QRLPPHILWATGLKSGGSSGGSSGSETPGTSESATPESSGGSSGGSDKKYSIGLAIGTNS
VGWAVITDEYKVPSKKFKVLGNTDRHSIKKNLIGALLFDSGETAEATRLKRTARRRYTRRK
NRICYLQEIFSNEMAKVDDSFFHRLEESFLVEEDKKHERHPIFGNIVDEVAYHEKYPTIYHL
RKKLVDSTDKADLRLIYLALAHMIKFRGHFLIEGDLNPDNSDVDKLFIQLVQTYNQLFEEN
PINASGVDAKAILSARLSKSRRLENLIAQLPGEKKNGLFGNLIALSLGLTPNFKSNFDLAED
AKLQLSKDTYDDDLDNLLAQIGDQYADLFLAAKNLSDAILLSDILRVNTEITKAPLSASMIK
RYDEHHQDLTLLKALVRQQLPEKYKEIFFDQSKNGYAGYIDGGASQEEFYKFIKPILEKM
DGTEELLVKLNREDLLRKQRTFDNGSIPHQIHLGELHAILRRQEDFYPFLKDNREKIEKIL
TFRIPYYVGPLARGNSRFAWMTRKSEETITPWNFEEWDKGASAQSFIERMTNFDKNLPNE
KVLPKHSLLYEYFTVYNELTKVKYVTEGMRKPAFLSGEQKKAIVDLLFKTNRKVTVKQLKE
DYFKKIECFDSVEISGVEDRFNASLGTYHDLLKIIKDKDFLDNEENEDILEDIVLTLTLFED
REMIEERLKTYAHLFDDKVMKQLKRRRYTGWGRLSRKLINGIRDKQSGKTILDFLKSDGF
ANRNFMQLIHDDSLTFKEDIQKAQVSGQGDSLHEHIANLAGSPAIKKGILQTVKWDELVK
VMGRHKPENIVIEMARENQTTQKGQKNSRERMKRIEEGIKELGSQILKEHPVENTQLQNE
KLYLYYLQNGRDMYVDQELDINRLSDYDVDHIVPQSFLKDDSIDNKVLTRSDKNRGKSDN
VPSEEWKKMKNYWRQLLNAKLITQRKFDNLTKAERGGLSELDKAGFIKRQLVETRQITK
HVAQILDSRMNTKYDENDKLIREVKVITLKSKLVSDFRKDFQFYKVREINNYHHAHDAYLN
AWGTALIKKYPKLESEFVYGDYKVYDVRKMIAKSEQEIGKATAKYFFYSNIMNFFKTEITL
ANGEIRKRPLIETNGETGEIVWDKGRDFATVRKVLSMPQVNIVKKTEVQTGGFSKESILPK
RNSDKLIARKKDWDPKKYGGFDSPTVAYSVLWAKVEKGKSKKLKSVKELLGITIMERSSF
EKNPIDFLEAKGYKEVKKDLIIKLPKYSLFELENGRKRMLASAGELQKGNELALPSKYVNF
LYLASHYEKLKGSPEDNEQKQLFVEQHKHYLDEIIEQISEFSKRVILADANLDKVLSAYNKH
RDKPIREQAENIIHLFTLTNLGAPAAFKYFDTTIDRKRYTSTKEVLDATLIHQSITGLYETRID
LSQLGGDSGGSGGSGGSTNLSDIIEKETGKQLVIQESILMLPEEVEEVIGNKPESDILVH
TAYDESTDENVMLLTSDAPEYKPWALVIQDSNGENKIKMLSGGSGGSGGSTNLSDII
EKETGKQLVIQESILMLPEEVEEVIGNKPESDILVHTAYDESTDENVMLLTSDAPEYK
PWALVIQDSNGENKIKMLSGGSKRTADGSEFEPKKKRKV
YE1-BE4
(SEQ ID NO: 224)
MKRTADGSEFESPKKKRKVSSETGPVAVDPTLRRRIEPHEFEVFFDPRELRKETCLLY
EINWGGRHSIWRHTSQNTNKHVEVNFIEKFTTERYFCPNTRCSITWFLSYSPCGECSR
AITEFLSRYPHVTLFIYIARLYHHADPENRQGLRDLISSGVTIQIMTEQESGYCWRNFV
NYSPSNEAHWPRYPHLWVRLYVLELYCIILGLPPCLNILRRKQPQLTFFTIALQSCHY
QRLPPHILWATGLKSGGSSGGSSGSETPGTSESATPESSGGSSGGSDKKYSIGLAIGTNS
VGWAVITDEYKVPSKKFKVLGNTDRHSIKKNLIGALLFDSGETAEATRLKRTARRRYTRRK
NRICYLQEIFSNEMAKVDDSFFHRLEESFLVEEDKKHERHPIFGNIVDEVAYHEKYPTIYHL
RKKLVDSTDKADLRLIYLALAHMIKFRGHFLIEGDLNPDNSDVDKLFIQLVQTYNQLFEEN
PINASGVDAKAILSARLSKSRRLENLIAQLPGEKKNGLFGNLIALSLGLTPNFKSNFDLAED
AKLQLSKDTYDDDLDNLLAQIGDQYADLFLAAKNLSDAILLSDILRVNTEITKAPLSASMIK
RYDEHHQDLTLLKALVRQQLPEKYKEIFFDQSKNGYAGYIDGGASQEEFYKFIKPILEKM
DGTEELLVKLNREDLLRKQRTFDNGSIPHQIHLGELHAILRRQEDFYPFLKDNREKIEKIL
TFRIPYYVGPLARGNSRFAWMTRKSEETITPWNFEEWDKGASAQSFIERMTNFDKNLPNE
KVLPKHSLLYEYFTVYNELTKVKYVTEGMRKPAFLSGEQKKAIVDLLFKTNRKVTVKQLKE
DYFKKIECFDSVEISGVEDRFNASLGTYHDLLKIIKDKDFLDNEENEDILEDIVLTLTLFED
REMIEERLKTYAHLFDDKVMKQLKRRRYTGWGRLSRKLINGIRDKQSGKTILDFLKSDGF
ANRNFMQLIHDDSLTFKEDIQKAQVSGQGDSLHEHIANLAGSPAIKKGILQTVKWDELVK
VMGRHKPENIVIEMARENQTTQKGQKNSRERMKRIEEGIKELGSQILKEHPVENTQLQNE
KLYLYYLQNGRDMYVDQELDINRLSDYDVDHIVPQSFLKDDSIDNKVLTRSDKNRGKSDN
VPSEEWKKMKNYWRQLLNAKLITQRKFDNLTKAERGGLSELDKAGFIKRQLVETRQITK
HVAQILDSRMNTKYDENDKLIREVKVITLKSKLVSDFRKDFQFYKVREINNYHHAHDAYLN
AWGTALIKKYPKLESEFVYGDYKVYDVRKMIAKSEQEIGKATAKYFFYSNIMNFFKTEITL
ANGEIRKRPLIETNGETGEIVWDKGRDFATVRKVLSMPQVNIVKKTEVQTGGFSKESILPK
RNSDKLIARKKDWDPKKYGGFDSPTVAYSVLWAKVEKGKSKKLKSVKELLGITIMERSSF
EKNPIDFLEAKGYKEVKKDLIIKLPKYSLFELENGRKRMLASAGELQKGNELALPSKYVNF
LYLASHYEKLKGSPEDNEQKQLFVEQHKHYLDEIIEQISEFSKRVILADANLDKVLSAYNKH
RDKPIREQAENIIHLFTLTNLGAPAAFKYFDTTIDRKRYTSTKEVLDATLIHQSITGLYETRID
LSQLGGDSGGSGGSGGSTNLSDIIEKETGKQLVIQESILMLPEEVEEVIGNKPESDILVH
TAYDESTDENVMLLTSDAPEYKPWALVIQDSNGENKIKMLSGGSGGSGGSTNLSDII
EKETGKQLVIQESILMLPEEVEEVIGNKPESDILVHTAYDESTDENVMLLTSDAPEYK
PWALVIQDSNGENKIKMLSGGSKRTADGSEFEPKKKRKV
YE2-BE4
(SEQ ID NO: 225)
MKRTADGSEFESPKKKRKVSSETGPVAVDPTLRRRIEPHEFEVFFDPRELRKETCLLY
EINWGGRHSIWRHTSQNTNKHVEVNFIEKFTTERYFCPNTRCSITWFLSYSPCGECSR
AITEFLSRYPHVTLFIYIARLYHHADPRNRQGLEDLISSGVTIQIMTEQESGYCWRNFV
NYSPSNEAHWPRYPHLWVRLYVLELYCIILGLPPCLNILRRKQPQLTFFTIALQSCHY
QRLPPHILWATGLKSGGSSGGSSGSETPGTSESATPESSGGSSGGSDKKYSIGLAIGTNS
VGWAVITDEYKVPSKKFKVLGNTDRHSIKKNLIGALLFDSGETAEATRLKRTARRRYTRRK
NRICYLQEIFSNEMAKVDDSFFHRLEESFLVEEDKKHERHPIFGNIVDEVAYHEKYPTIYHL
RKKLVDSTDKADLRLIYLALAHMIKFRGHFLIEGDLNPDNSDVDKLFIQLVQTYNQLFEEN
PINASGVDAKAILSARLSKSRRLENLIAQLPGEKKNGLFGNLIALSLGLTPNFKSNFDLAED
AKLQLSKDTYDDDLDNLLAQIGDQYADLFLAAKNLSDAILLSDILRVNTEITKAPLSASMIK
RYDEHHQDLTLLKALVRQQLPEKYKEIFFDQSKNGYAGYIDGGASQEEFYKFIKPILEKM
DGTEELLVKLNREDLLRKQRTFDNGSIPHQIHLGELHAILRRQEDFYPFLKDNREKIEKIL
TFRIPYYVGPLARGNSRFAWMTRKSEETITPWNFEEWDKGASAQSFIERMTNFDKNLPNE
KVLPKHSLLYEYFTVYNELTKVKYVTEGMRKPAFLSGEQKKAIVDLLFKTNRKVTVKQLKE
DYFKKIECFDSVEISGVEDRFNASLGTYHDLLKIIKDKDFLDNEENEDILEDIVLTLTLFED
REMIEERLKTYAHLFDDKVMKQLKRRRYTGWGRLSRKLINGIRDKQSGKTILDFLKSDGF
ANRNFMQLIHDDSLTFKEDIQKAQVSGQGDSLHEHIANLAGSPAIKKGILQTVKWDELVK
VMGRHKPENIVIEMARENQTTQKGQKNSRERMKRIEEGIKELGSQILKEHPVENTQLQNE
KLYLYYLQNGRDMYVDQELDINRLSDYDVDHIVPQSFLKDDSIDNKVLTRSDKNRGKSDN
VPSEEWKKMKNYWRQLLNAKLITQRKFDNLTKAERGGLSELDKAGFIKRQLVETRQITK
HVAQILDSRMNTKYDENDKLIREVKVITLKSKLVSDFRKDFQFYKVREINNYHHAHDAYLN
AWGTALIKKYPKLESEFVYGDYKVYDVRKMIAKSEQEIGKATAKYFFYSNIMNFFKTEITL
ANGEIRKRPLIETNGETGEIVWDKGRDFATVRKVLSMPQVNIVKKTEVQTGGFSKESILPK
RNSDKLIARKKDWDPKKYGGFDSPTVAYSVLWAKVEKGKSKKLKSVKELLGITIMERSSF
EKNPIDFLEAKGYKEVKKDLIIKLPKYSLFELENGRKRMLASAGELQKGNELALPSKYVNF
LYLASHYEKLKGSPEDNEQKQLFVEQHKHYLDEIIEQISEFSKRVILADANLDKVLSAYNKH
RDKPIREQAENIIHLFTLTNLGAPAAFKYFDTTIDRKRYTSTKEVLDATLIHQSITGLYETRID
LSQLGGDSGGSGGSGGSTNLSDIIEKETGKQLVIQESILMLPEEVEEVIGNKPESDILVH
TAYDESTDENVMLLTSDAPEYKPWALVIQDSNGENKIKMLSGGSGGSGGSTNLSDII
EKETGKQLVIQESILMLPEEVEEVIGNKPESDILVHTAYDESTDENVMLLTSDAPEYK
PWALVIQDSNGENKIKMLSGGSKRTADGSEFEPKKKRKV
YEE-BE4
(SEQ ID NO: 226)
MKRTADGSEFESPKKKRKVSSETGPVAVDPTLRRRIEPHEFEVFFDPRELRKETCLLY
EINWGGRHSIWRHTSQNTNKHVEVNFIEKFTTERYFCPNTRCSITWFLSYSPCGECSR
AITEFLSRYPHVTLFIYIARLYHHADPENRQGLEDLISSGVTIQIMTEQESGYCWRNFV
NYSPSNEAHWPRYPHLWVRLYVLELYCIILGLPPCLNILRRKQPQLTFFTIALQSCHY
QRLPPHILWATGLKSGGSSGGSSGSETPGTSESATPESSGGSSGGSDKKYSIGLAIGTNS
VGWAVITDEYKVPSKKFKVLGNTDRHSIKKNLIGALLFDSGETAEATRLKRTARRRYTRRK
NRICYLQEIFSNEMAKVDDSFFHRLEESFLVEEDKKHERHPIFGNIVDEVAYHEKYPTIYHL
RKKLVDSTDKADLRLIYLALAHMIKFRGHFLIEGDLNPDNSDVDKLFIQLVQTYNQLFEEN
PINASGVDAKAILSARLSKSRRLENLIAQLPGEKKNGLFGNLIALSLGLTPNFKSNFDLAED
AKLQLSKDTYDDDLDNLLAQIGDQYADLFLAAKNLSDAILLSDILRVNTEITKAPLSASMIK
RYDEHHQDLTLLKALVRQQLPEKYKEIFFDQSKNGYAGYIDGGASQEEFYKFIKPILEKM
DGTEELLVKLNREDLLRKQRTFDNGSIPHQIHLGELHAILRRQEDFYPFLKDNREKIEKIL
TFRIPYYVGPLARGNSRFAWMTRKSEETITPWNFEEWDKGASAQSFIERMTNFDKNLPNE
KVLPKHSLLYEYFTVYNELTKVKYVTEGMRKPAFLSGEQKKAIVDLLFKTNRKVTVKQLKE
DYFKKIECFDSVEISGVEDRFNASLGTYHDLLKIIKDKDFLDNEENEDILEDIVLTLTLFED
REMIEERLKTYAHLFDDKVMKQLKRRRYTGWGRLSRKLINGIRDKQSGKTILDFLKSDGF
ANRNFMQLIHDDSLTFKEDIQKAQVSGQGDSLHEHIANLAGSPAIKKGILQTVKWDELVK
VMGRHKPENIVIEMARENQTTQKGQKNSRERMKRIEEGIKELGSQILKEHPVENTQLQNE
KLYLYYLQNGRDMYVDQELDINRLSDYDVDHIVPQSFLKDDSIDNKVLTRSDKNRGKSDN
VPSEEWKKMKNYWRQLLNAKLITQRKFDNLTKAERGGLSELDKAGFIKRQLVETRQITK
HVAQILDSRMNTKYDENDKLIREVKVITLKSKLVSDFRKDFQFYKVREINNYHHAHDAYLN
AWGTALIKKYPKLESEFVYGDYKVYDVRKMIAKSEQEIGKATAKYFFYSNIMNFFKTEITL
ANGEIRKRPLIETNGETGEIVWDKGRDFATVRKVLSMPQVNIVKKTEVQTGGFSKESILPK
RNSDKLIARKKDWDPKKYGGFDSPTVAYSVLWAKVEKGKSKKLKSVKELLGITIMERSSF
EKNPIDFLEAKGYKEVKKDLIIKLPKYSLFELENGRKRMLASAGELQKGNELALPSKYVNF
LYLASHYEKLKGSPEDNEQKQLFVEQHKHYLDEIIEQISEFSKRVILADANLDKVLSAYNKH
RDKPIREQAENIIHLFTLTNLGAPAAFKYFDTTIDRKRYTSTKEVLDATLIHQSITGLYETRID
LSQLGGDSGGSGGSGGSTNLSDIIEKETGKQLVIQESILMLPEEVEEVIGNKPESDILVH
TAYDESTDENVMLLTSDAPEYKPWALVIQDSNGENKIKMLSGGSGGSGGSTNLSDII
EKETGKQLVIQESILMLPEEVEEVIGNKPESDILVHTAYDESTDENVMLLTSDAPEYK
PWALVIQDSNGENKIKMLSGGSKRTADGSEFEPKKKRKV
EE-BE4
(SEQ ID NO: 227)
MKRTADGSEFESPKKKRKVSSETGPVAVDPTLRRRIEPHEFEVFFDPRELRKETCLLY
EINWGGRHSIWRHTSQNTNKHVEVNFIEKFTTERYFCPNTRCSITWFLSWSPCGECSR
AITEFLSRYPHVTLFIYIARLYHHADPENRQGLEDLISSGVTIQIMTEQESGYCWRNFV
NYSPSNEAHWPRYPHLWVRLYVLELYCIILGLPPCLNILRRKQPQLTFFTIALQSCHY
QRLPPHILWATGLKSGGSSGGSSGSETPGTSESATPESSGGSSGGSDKKYSIGLAIGTNS
VGWAVITDEYKVPSKKFKVLGNTDRHSIKKNLIGALLFDSGETAEATRLKRTARRRYTRRK
NRICYLQEIFSNEMAKVDDSFFHRLEESFLVEEDKKHERHPIFGNIVDEVAYHEKYPTIYHL
RKKLVDSTDKADLRLIYLALAHMIKFRGHFLIEGDLNPDNSDVDKLFIQLVQTYNQLFEEN
PINASGVDAKAILSARLSKSRRLENLIAQLPGEKKNGLFGNLIALSLGLTPNFKSNFDLAED
AKLQLSKDTYDDDLDNLLAQIGDQYADLFLAAKNLSDAILLSDILRVNTEITKAPLSASMIK
RYDEHHQDLTLLKALVRQQLPEKYKEIFFDQSKNGYAGYIDGGASQEEFYKFIKPILEKM
DGTEELLVKLNREDLLRKQRTFDNGSIPHQIHLGELHAILRRQEDFYPFLKDNREKIEKIL
TFRIPYYVGPLARGNSRFAWMTRKSEETITPWNFEEWDKGASAQSFIERMTNFDKNLPNE
KVLPKHSLLYEYFTVYNELTKVKYVTEGMRKPAFLSGEQKKAIVDLLFKTNRKVTVKQLKE
DYFKKIECFDSVEISGVEDRFNASLGTYHDLLKIIKDKDFLDNEENEDILEDIVLTLTLFED
REMIEERLKTYAHLFDDKVMKQLKRRRYTGWGRLSRKLINGIRDKQSGKTILDFLKSDGF
ANRNFMQLIHDDSLTFKEDIQKAQVSGQGDSLHEHIANLAGSPAIKKGILQTVKWDELVK
VMGRHKPENIVIEMARENQTTQKGQKNSRERMKRIEEGIKELGSQILKEHPVENTQLQNE
KLYLYYLQNGRDMYVDQELDINRLSDYDVDHIVPQSFLKDDSIDNKVLTRSDKNRGKSDN
VPSEEWKKMKNYWRQLLNAKLITQRKFDNLTKAERGGLSELDKAGFIKRQLVETRQITK
HVAQILDSRMNTKYDENDKLIREVKVITLKSKLVSDFRKDFQFYKVREINNYHHAHDAYLN
AWGTALIKKYPKLESEFVYGDYKVYDVRKMIAKSEQEIGKATAKYFFYSNIMNFFKTEITL
ANGEIRKRPLIETNGETGEIVWDKGRDFATVRKVLSMPQVNIVKKTEVQTGGFSKESILPK
RNSDKLIARKKDWDPKKYGGFDSPTVAYSVLWAKVEKGKSKKLKSVKELLGITIMERSSF
EKNPIDFLEAKGYKEVKKDLIIKLPKYSLFELENGRKRMLASAGELQKGNELALPSKYVNF
LYLASHYEKLKGSPEDNEQKQLFVEQHKHYLDEIIEQISEFSKRVILADANLDKVLSAYNKH
RDKPIREQAENIIHLFTLTNLGAPAAFKYFDTTIDRKRYTSTKEVLDATLIHQSITGLYETRID
LSQLGGDSGGSGGSGGSTNLSDIIEKETGKQLVIQESILMLPEEVEEVIGNKPESDILVH
TAYDESTDENVMLLTSDAPEYKPWALVIQDSNGENKIKMLSGGSGGSGGSTNLSDII
EKETGKQLVIQESILMLPEEVEEVIGNKPESDILVHTAYDESTDENVMLLTSDAPEYK
PWALVIQDSNGENKIKMLSGGSKRTADGSEFEPKKKRKV
R33A-BE4
(SEQ ID NO: 228)
MKRTADGSEFESPKKKRKVSSETGPVAVDPTLRRRIEPHEFEVFFDPRELAKETCLLY
EINWGGRHSIWRHTSQNTNKHVEVNFIEKFTTERYFCPNTRCSITWFLSWSPCGECSR
AITEFLSRYPHVTLFIYIARLYHHADPRNRQGLRDLISSGVTIQIMTEQESGYCWRNFV
NYSPSNEAHWPRYPHLWVRLYVLELYCIILGLPPCLNILRRKQPQLTFFTIALQSCHY
QRLPPHILWATGLKSGGSSGGSSGSETPGTSESATPESSGGSSGGSDKKYSIGLAIGTNS
VGWAVITDEYKVPSKKFKVLGNTDRHSIKKNLIGALLFDSGETAEATRLKRTARRRYTRRK
NRICYLQEIFSNEMAKVDDSFFHRLEESFLVEEDKKHERHPIFGNIVDEVAYHEKYPTIYHL
RKKLVDSTDKADLRLIYLALAHMIKFRGHFLIEGDLNPDNSDVDKLFIQLVQTYNQLFEEN
PINASGVDAKAILSARLSKSRRLENLIAQLPGEKKNGLFGNLIALSLGLTPNFKSNFDLAED
AKLQLSKDTYDDDLDNLLAQIGDQYADLFLAAKNLSDAILLSDILRVNTEITKAPLSASMIK
RYDEHHQDLTLLKALVRQQLPEKYKEIFFDQSKNGYAGYIDGGASQEEFYKFIKPILEKM
DGTEELLVKLNREDLLRKQRTFDNGSIPHQIHLGELHAILRRQEDFYPFLKDNREKIEKIL
TFRIPYYVGPLARGNSRFAWMTRKSEETITPWNFEEWDKGASAQSFIERMTNFDKNLPNE
KVLPKHSLLYEYFTVYNELTKVKYVTEGMRKPAFLSGEQKKAIVDLLFKTNRKVTVKQLKE
DYFKKIECFDSVEISGVEDRFNASLGTYHDLLKIIKDKDFLDNEENEDILEDIVLTLTLFED
REMIEERLKTYAHLFDDKVMKQLKRRRYTGWGRLSRKLINGIRDKQSGKTILDFLKSDGF
ANRNFMQLIHDDSLTFKEDIQKAQVSGQGDSLHEHIANLAGSPAIKKGILQTVKWDELVK
VMGRHKPENIVIEMARENQTTQKGQKNSRERMKRIEEGIKELGSQILKEHPVENTQLQNE
KLYLYYLQNGRDMYVDQELDINRLSDYDVDHIVPQSFLKDDSIDNKVLTRSDKNRGKSDN
VPSEEWKKMKNYWRQLLNAKLITQRKFDNLTKAERGGLSELDKAGFIKRQLVETRQITK
HVAQILDSRMNTKYDENDKLIREVKVITLKSKLVSDFRKDFQFYKVREINNYHHAHDAYLN
AWGTALIKKYPKLESEFVYGDYKVYDVRKMIAKSEQEIGKATAKYFFYSNIMNFFKTEITL
ANGEIRKRPLIETNGETGEIVWDKGRDFATVRKVLSMPQVNIVKKTEVQTGGFSKESILPK
RNSDKLIARKKDWDPKKYGGFDSPTVAYSVLWAKVEKGKSKKLKSVKELLGITIMERSSF
EKNPIDFLEAKGYKEVKKDLIIKLPKYSLFELENGRKRMLASAGELQKGNELALPSKYVNF
LYLASHYEKLKGSPEDNEQKQLFVEQHKHYLDEIIEQISEFSKRVILADANLDKVLSAYNKH
RDKPIREQAENIIHLFTLTNLGAPAAFKYFDTTIDRKRYTSTKEVLDATLIHQSITGLYETRID
LSQLGGDSGGSGGSGGSTNLSDIIEKETGKQLVIQESILMLPEEVEEVIGNKPESDILVH
TAYDESTDENVMLLTSDAPEYKPWALVIQDSNGENKIKMLSGGSGGSGGSTNLSDII
EKETGKQLVIQESILMLPEEVEEVIGNKPESDILVHTAYDESTDENVMLLTSDAPEYK
PWALVIQDSNGENKIKMLSGGSKRTADGSEFEPKKKRKV
R33A + K34A-BE4
(SEQ ID NO: 229)
MKRTADGSEFESPKKKRKVSSETGPVAVDPTLRRRIEPHEFEVFFDPRELAAETCLLY
EINWGGRHSIWRHTSQNTNKHVEVNFIEKFTTERYFCPNTRCSITWFLSWSPCGECSR
AITEFLSRYPHVTLFIYIARLYHHADPRNRQGLRDLISSGVTIQIMTEQESGYCWRNFV
NYSPSNEAHWPRYPHLWVRLYVLELYCIILGLPPCLNILRRKQPQLTFFTIALQSCHY
QRLPPHILWATGLKSGGSSGGSSGSETPGTSESATPESSGGSSGGSDKKYSIGLAIGTNS
VGWAVITDEYKVPSKKFKVLGNTDRHSIKKNLIGALLFDSGETAEATRLKRTARRRYTRRK
NRICYLQEIFSNEMAKVDDSFFHRLEESFLVEEDKKHERHPIFGNIVDEVAYHEKYPTIYHL
RKKLVDSTDKADLRLIYLALAHMIKFRGHFLIEGDLNPDNSDVDKLFIQLVQTYNQLFEEN
PINASGVDAKAILSARLSKSRRLENLIAQLPGEKKNGLFGNLIALSLGLTPNFKSNFDLAED
AKLQLSKDTYDDDLDNLLAQIGDQYADLFLAAKNLSDAILLSDILRVNTEITKAPLSASMIK
RYDEHHQDLTLLKALVRQQLPEKYKEIFFDQSKNGYAGYIDGGASQEEFYKFIKPILEKM
DGTEELLVKLNREDLLRKQRTFDNGSIPHQIHLGELHAILRRQEDFYPFLKDNREKIEKIL
TFRIPYYVGPLARGNSRFAWMTRKSEETITPWNFEEWDKGASAQSFIERMTNFDKNLPNE
KVLPKHSLLYEYFTVYNELTKVKYVTEGMRKPAFLSGEQKKAIVDLLFKTNRKVTVKQLKE
DYFKKIECFDSVEISGVEDRFNASLGTYHDLLKIIKDKDFLDNEENEDILEDIVLTLTLFED
REMIEERLKTYAHLFDDKVMKQLKRRRYTGWGRLSRKLINGIRDKQSGKTILDFLKSDGF
ANRNFMQLIHDDSLTFKEDIQKAQVSGQGDSLHEHIANLAGSPAIKKGILQTVKWDELVK
VMGRHKPENIVIEMARENQTTQKGQKNSRERMKRIEEGIKELGSQILKEHPVENTQLQNE
KLYLYYLQNGRDMYVDQELDINRLSDYDVDHIVPQSFLKDDSIDNKVLTRSDKNRGKSDN
VPSEEWKKMKNYWRQLLNAKLITQRKFDNLTKAERGGLSELDKAGFIKRQLVETRQITK
HVAQILDSRMNTKYDENDKLIREVKVITLKSKLVSDFRKDFQFYKVREINNYHHAHDAYLN
AWGTALIKKYPKLESEFVYGDYKVYDVRKMIAKSEQEIGKATAKYFFYSNIMNFFKTEITL
ANGEIRKRPLIETNGETGEIVWDKGRDFATVRKVLSMPQVNIVKKTEVQTGGFSKESILPK
RNSDKLIARKKDWDPKKYGGFDSPTVAYSVLWAKVEKGKSKKLKSVKELLGITIMERSSF
EKNPIDFLEAKGYKEVKKDLIIKLPKYSLFELENGRKRMLASAGELQKGNELALPSKYVNF
LYLASHYEKLKGSPEDNEQKQLFVEQHKHYLDEIIEQISEFSKRVILADANLDKVLSAYNKH
RDKPIREQAENIIHLFTLTNLGAPAAFKYFDTTIDRKRYTSTKEVLDATLIHQSITGLYETRID
LSQLGGDSGGSGGSGGSTNLSDIIEKETGKQLVIQESILMLPEEVEEVIGNKPESDILVH
TAYDESTDENVMLLTSDAPEYKPWALVIQDSNGENKIKMLSGGSGGSGGSTNLSDII
EKETGKQLVIQESILMLPEEVEEVIGNKPESDILVHTAYDESTDENVMLLTSDAPEYK
PWALVIQDSNGENKIKMLSGGSKRTADGSEFEPKKKRKV
APOBEC3A (A3A)-BE4
(SEQ ID NO: 230)
MKRTADGSEFESPKKKRKVSEASPASGPRHLMDPHIFTSNFNNGIGRHKTYLCYEVE
RLDNGTSVKMDQHRGFLHNQAKNLLCGFYGRHAELRFLDLVPSLQLDPAQIYRVTW
FISWSPCFSWGCAGEVRAFLQENTHVRLRIFAARIYDYDPLYKEALQMLRDAGAQVS
IMTYDEFKHCWDTFVDHQGCPFQPWDGLDEHSQALSGRLRAILQNQGNSGGSSGGS
SGSETPGTSESATPESSGGSSGGSDKKYSIGLAIGTNSVGWAVITDEYKVPSKKFKVLGNT
DRHSIKKNLIGALLFDSGETAEATRLKRTARRRYTRRKNRICYLQEIFSNEMAKVDDSFFHR
LEESFLVEEDKKHERHPIFGNIVDEVAYHEKYPTIYHLRKKLVDSTDKADLRLIYLALAHMI
KFRGHFLIEGDLNPDNSDVDKLFIQLVQTYNQLFEENPINASGVDAKAILSARLSKSRRLEN
LIAQLPGEKKNGLFGNLIALSLGLTPNFKSNFDLAEDAKLQLSKDTYDDDLDNLLAQIGD
QYADLFLAAKNLSDAILLSDILRVNTEITKAPLSASMIKRYDEHHQDLTLLKALVRQQLPEK
YKEIFFDQSKNGYAGYIDGGASQEEFYKFIKPILEKMDGTEELLVKLNREDLLRKQRTFDN
GSIPHQIHLGELHAILRRQEDFYPFLKDNREKIEKILTFRIPYYVGPLARGNSRFAWMTRKS
EETITPWNFEEWDKGASAQSFIERMTNFDKNLPNEKVLPKHSLLYEYFTVYNELTKVKYV
TEGMRKPAFLSGEQKKAIVDLLFKTNRKVTVKQLKEDYFKKIECFDSVEISGVEDRFNASL
GTYHDLLKIIKDKDFLDNEENEDILEDIVLTLTLFEDREMIEERLKTYAHLFDDKVMKQLK
RRRYTGWGRLSRKLINGIRDKQSGKTILDFLKSDGFANRNFMQLIHDDSLTFKEDIQKAQ
VSGQGDSLHEHIANLAGSPAIKKGILQTVKWDELVKVMGRHKPENIVIEMARENQTTQK
GQKNSRERMKRIEEGIKELGSQILKEHPVENTQLQNEKLYLYYLQNGRDMYVDQELDINR
LSDYDVDHIVPQSFLKDDSIDNKVLTRSDKNRGKSDNVPSEEWKKMKNYWRQLLNAKLI
TQRKFDNLTKAERGGLSELDKAGFIKRQLVETRQITKHVAQILDSRMNTKYDENDKLIREV
KVITLKSKLVSDFRKDFQFYKVREINNYHHAHDAYLNAWGTALIKKYPKLESEFVYGDYK
VYDVRKMIAKSEQEIGKATAKYFFYSNIMNFFKTEITLANGEIRKRPLIETNGETGEIVWDK
GRDFATVRKVLSMPQVNIVKKTEVQTGGFSKESILPKRNSDKLIARKKDWDPKKYGGFDS
PTVAYSVLWAKVEKGKSKKLKSVKELLGITIMERSSFEKNPIDFLEAKGYKEVKKDLIIKLP
KYSLFELENGRKRMLASAGELQKGNELALPSKYVNFLYLASHYEKLKGSPEDNEQKQLFV
EQHKHYLDEIIEQISEFSKRVILADANLDKVLSAYNKHRDKPIREQAENIIHLFTLTNLGAPA
AFKYFDTTIDRKRYTSTKEVLDATLIHQSITGLYETRIDLSQLGGDSGGSGGSGGSTNLSDI
IEKETGKQLVIQESILMLPEEVEEVIGNKPESDILVHTAYDESTDENVMLLTSDAPEYK
PWALVIQDSNGENKIKMLSGGSGGSGGSTNLSDIIEKETGKQLVIQESILMLPEEVEEV
IGNKPESDILVHTAYDESTDENVMLLTSDAPEYKPWALVIQDSNGENKIKMLSGGSK
RTADGSEFEPKKKRKV
APOBEC3B (A3B)-BE4
(SEQ ID NO: 231)
MKRTADGSEFESPKKKRKVNPQIRNPMERMYRDTFYDNFENEPILYGRSYTWLCYE
VKIKRGRSNLLWDTGVFRGQVYFKPQYHAEMCFLSWFCGNQLPAYKCFQITWFVS
WTPCPDCVAKLAEFLSEHPNVTLTISAARLYYYWERDYRRALCRLSQAGARVTIMD
YEEFAYCWENFVYNEGQQFMPWYKFDENYAFLHRTLKEILRYLMDPDTFTFNFNND
PLVLRRRQTYLCYEVERLDNGTWVLMDQHMGFLCNEAKNLLCGFYGRHAELRFLD
LVPSLQLDPAQIYRVTWFISWSPCFSWGCAGEVRAFLQENTHVRLRIFAARIYDYDPL
YKEALQMLRDAGAQVSIMTYDEFEYCWDTFVYRQGCPFQPWDGLEEHSQALSGRL
RAILQNQGNSGGSSGGSSGSETPGTSESATPESSGGSSGGSDKKYSIGLAIGTNSVGWAV
ITDEYKVPSKKFKVLGNTDRHSIKKNLIGALLFDSGETAEATRLKRTARRRYTRRKNRICYL
QEIFSNEMAKVDDSFFHRLEESFLVEEDKKHERHPIFGNIVDEVAYHEKYPTIYHLRKKLV
DSTDKADLRLIYLALAHMIKFRGHFLIEGDLNPDNSDVDKLFIQLVQTYNQLFEENPINAS
GVDAKAILSARLSKSRRLENLIAQLPGEKKNGLFGNLIALSLGLTPNFKSNFDLAEDAKLQL
SKDTYDDDLDNLLAQIGDQYADLFLAAKNLSDAILLSDILRVNTEITKAPLSASMIKRYDEH
HQDLTLLKALVRQQLPEKYKEIFFDQSKNGYAGYIDGGASQEEFYKFIKPILEKMDGTEEL
LVKLNREDLLRKQRTFDNGSIPHQIHLGELHAILRRQEDFYPFLKDNREKIEKILTFRIPYY
VGPLARGNSRFAWMTRKSEETITPWNFEEWDKGASAQSFIERMTNFDKNLPNEKVLPKH
SLLYEYFTVYNELTKVKYVTEGMRKPAFLSGEQKKAIVDLLFKTNRKVTVKQLKEDYFKKI
ECFDSVEISGVEDRFNASLGTYHDLLKIIKDKDFLDNEENEDILEDIVLTLTLFEDREMIEE
RLKTYAHLFDDKVMKQLKRRRYTGWGRLSRKLINGIRDKQSGKTILDFLKSDGFANRNFM
QLIHDDSLTFKEDIQKAQVSGQGDSLHEHIANLAGSPAIKKGILQTVKWDELVKVMGRH
KPENIVIEMARENQTTQKGQKNSRERMKRIEEGIKELGSQILKEHPVENTQLQNEKLYLYY
LQNGRDMYVDQELDINRLSDYDVDHIVPQSFLKDDSIDNKVLTRSDKNRGKSDNVPSEEV
VKKMKNYWRQLLNAKLITQRKFDNLTKAERGGLSELDKAGFIKRQLVETRQITKHVAQIL
DSRMNTKYDENDKLIREVKVITLKSKLVSDFRKDFQFYKVREINNYHHAHDAYLNAWGT
ALIKKYPKLESEFVYGDYKVYDVRKMIAKSEQEIGKATAKYFFYSNIMNFFKTEITLANGEI
RKRPLIETNGETGEIVWDKGRDFATVRKVLSMPQVNIVKKTEVQTGGFSKESILPKRNSDK
LIARKKDWDPKKYGGFDSPTVAYSVLWAKVEKGKSKKLKSVKELLGITIMERSSFEKNPI
DFLEAKGYKEVKKDLIIKLPKYSLFELENGRKRMLASAGELQKGNELALPSKYVNFLYLAS
HYEKLKGSPEDNEQKQLFVEQHKHYLDEIIEQISEFSKRVILADANLDKVLSAYNKHRDKP
IREQAENIIHLFTLTNLGAPAAFKYFDTTIDRKRYTSTKEVLDATLIHQSITGLYETRIDLSQL
GGDSGGSGGSGGSTNLSDIIEKETGKQLVIQESILMLPEEVEEVIGNKPESDILVHTAY
DESTDENVMLLTSDAPEYKPWALVIQDSNGENKIKMLSGGSGGSGGSTNLSDIIEKET
GKQLVIQESILMLPEEVEEVIGNKPESDILVHTAYDESTDENVMLLTSDAPEYKPWAL
VIQDSNGENKIKMLSGGSKRTADGSEFEPKKKRKV
APOBEC3G (A3G)-BE4
(SEQ ID NO: 232)
MKRTADGSEFESPKKKRKVKPHFRNTVERMYRDTFSYNFYNRPILSRRNTVWLCYE
VKTKGPSRPPLDAKIFRGQVYSELKYHPEMRFFHWFSKWRKLHRDQEYEVTWYISW
SPCTKCTRDMATFLAEDPKVTLTIFVARLYYFWDPDYQEALRSLCQKRDGPRATMKI
MNYDEFQHCWSKFVYSQRELFEPWNNLPKYYILLHIMLGEILRHSMDPPTFTFNFNN
EPWVRGRHETYLCYEVERMHNDTWVLLNQRRGFLCNQAPHKHGFLEGRHAELCFL
DVIPFWKLDLDQDYRVTCFTSWSPCFSCAQEMAKFISKNKHVSLCIFTARIYDDQGR
CQEGLRTLAEAGAKISIMTYSEFKHCWDTFVDHQGCPFQPWDGLDEHSQDLSGRLR
AILQNQENSGGSSGGSSGSETPGTSESATPESSGGSSGGSDKKYSIGLAIGTNSVGWAVIT
DEYKVPSKKFKVLGNTDRHSIKKNLIGALLFDSGETAEATRLKRTARRRYTRRKNRICYLQE
IFSNEMAKVDDSFFHRLEESFLVEEDKKHERHPIFGNIVDEVAYHEKYPTIYHLRKKLVDS
TDKADLRLIYLALAHMIKFRGHFLIEGDLNPDNSDVDKLFIQLVQTYNQLFEENPINASGV
DAKAILSARLSKSRRLENLIAQLPGEKKNGLFGNLIALSLGLTPNFKSNFDLAEDAKLQLSK
DTYDDDLDNLLAQIGDQYADLFLAAKNLSDAILLSDILRVNTEITKAPLSASMIKRYDEHHQ
DLTLLKALVRQQLPEKYKEIFFDQSKNGYAGYIDGGASQEEFYKFIKPILEKMDGTEELLV
KLNREDLLRKQRTFDNGSIPHQIHLGELHAILRRQEDFYPFLKDNREKIEKILTFRIPYYVG
PLARGNSRFAWMTRKSEETITPWNFEEWDKGASAQSFIERMTNFDKNLPNEKVLPKHSL
LYEYFTVYNELTKVKYVTEGMRKPAFLSGEQKKAIVDLLFKTNRKVTVKQLKEDYFKKIEC
FDSVEISGVEDRFNASLGTYHDLLKIIKDKDFLDNEENEDILEDIVLTLTLFEDREMIEERL
KTYAHLFDDKVMKQLKRRRYTGWGRLSRKLINGIRDKQSGKTILDFLKSDGFANRNFMQ
LIHDDSLTFKEDIQKAQVSGQGDSLHEHIANLAGSPAIKKGILQTVKWDELVKVMGRHK
PENIVIEMARENQTTQKGQKNSRERMKRIEEGIKELGSQILKEHPVENTQLQNEKLYLYYL
QNGRDMYVDQELDINRLSDYDVDHIVPQSFLKDDSIDNKVLTRSDKNRGKSDNVPSEEW
KKMKNYWRQLLNAKLITQRKFDNLTKAERGGLSELDKAGFIKRQLVETRQITKHVAQILD
SRMNTKYDENDKLIREVKVITLKSKLVSDFRKDFQFYKVREINNYHHAHDAYLNAWGTAL
IKKYPKLESEFVYGDYKVYDVRKMIAKSEQEIGKATAKYFFYSNIMNFFKTEITLANGEIRK
RPLIETNGETGEIVWDKGRDFATVRKVLSMPQVNIVKKTEVQTGGFSKESILPKRNSDKLI
ARKKDWDPKKYGGFDSPTVAYSVLWAKVEKGKSKKLKSVKELLGITIMERSSFEKNPIDF
LEAKGYKEVKKDLIIKLPKYSLFELENGRKRMLASAGELQKGNELALPSKYVNFLYLASHY
EKLKGSPEDNEQKQLFVEQHKHYLDEIIEQISEFSKRVILADANLDKVLSAYNKHRDKPIR
EQAENIIHLFTLTNLGAPAAFKYFDTTIDRKRYTSTKEVLDATLIHQSITGLYETRIDLSQLG
GDSGGSGGSGGSTNLSDIIEKETGKQLVIQESILMLPEEVEEVIGNKPESDILVHTAYD
ESTDENVMLLTSDAPEYKPWALVIQDSNGENKIKMLSGGSGGSGGSTNLSDIIEKETG
KQLVIQESILMLPEEVEEVIGNKPESDILVHTAYDESTDENVMLLTSDAPEYKPWALV
IQDSNGENKIKMLSGGSKRTADGSEFEPKKKRKV
AID-BE4
(SEQ ID NO: 233)
MKRTADGSEFESPKKKRKVDSLLMNRRKFLYQFKNVRWAKGRRETYLCYVVKRRD
SATSFSLDFGYLRNKNGCHVELLFLRYISDWDLDPGRCYRVTWFTSWSPCYDCARH
VADFLRGNPNLSLRIFTARLYFCEDRKAEPEGLRRLHRAGVQIAIMTFKDYFYCWNT
FVENHERTFKAWEGLHENSVRLSRQLRRILLPLYEVDDLRDAFRTLGLSGGSSGGSS
GSETPGTSESATPESSGGSSGGSDKKYSIGLAIGTNSVGWAVITDEYKVPSKKFKVLGNTD
RHSIKKNLIGALLFDSGETAEATRLKRTARRRYTRRKNRICYLQEIFSNEMAKVDDSFFHRL
EESFLVEEDKKHERHPIFGNIVDEVAYHEKYPTIYHLRKKLVDSTDKADLRLIYLALAHMIK
FRGHFLIEGDLNPDNSDVDKLFIQLVQTYNQLFEENPINASGVDAKAILSARLSKSRRLENL
IAQLPGEKKNGLFGNLIALSLGLTPNFKSNFDLAEDAKLQLSKDTYDDDLDNLLAQIGDQ
YADLFLAAKNLSDAILLSDILRVNTEITKAPLSASMIKRYDEHHQDLTLLKALVRQQLPEKY
KEIFFDQSKNGYAGYIDGGASQEEFYKFIKPILEKMDGTEELLVKLNREDLLRKQRTFDN
GSIPHQIHLGELHAILRRQEDFYPFLKDNREKIEKILTFRIPYYVGPLARGNSRFAWMTRKS
EETITPWNFEEWDKGASAQSFIERMTNFDKNLPNEKVLPKHSLLYEYFTVYNELTKVKYV
TEGMRKPAFLSGEQKKAIVDLLFKTNRKVTVKQLKEDYFKKIECFDSVEISGVEDRFNASL
GTYHDLLKIIKDKDFLDNEENEDILEDIVLTLTLFEDREMIEERLKTYAHLFDDKVMKQLK
RRRYTGWGRLSRKLINGIRDKQSGKTILDFLKSDGFANRNFMQLIHDDSLTFKEDIQKAQ
VSGQGDSLHEHIANLAGSPAIKKGILQTVKWDELVKVMGRHKPENIVIEMARENQTTQK
GQKNSRERMKRIEEGIKELGSQILKEHPVENTQLQNEKLYLYYLQNGRDMYVDQELDINR
LSDYDVDHIVPQSFLKDDSIDNKVLTRSDKNRGKSDNVPSEEWKKMKNYWRQLLNAKLI
TQRKFDNLTKAERGGLSELDKAGFIKRQLVETRQITKHVAQILDSRMNTKYDENDKLIREV
KVITLKSKLVSDFRKDFQFYKVREINNYHHAHDAYLNAWGTALIKKYPKLESEFVYGDYK
VYDVRKMIAKSEQEIGKATAKYFFYSNIMNFFKTEITLANGEIRKRPLIETNGETGEIVWDK
GRDFATVRKVLSMPQVNIVKKTEVQTGGFSKESILPKRNSDKLIARKKDWDPKKYGGFDS
PTVAYSVLWAKVEKGKSKKLKSVKELLGITIMERSSFEKNPIDFLEAKGYKEVKKDLIIKLP
KYSLFELENGRKRMLASAGELQKGNELALPSKYVNFLYLASHYEKLKGSPEDNEQKQLFV
EQHKHYLDEIIEQISEFSKRVILADANLDKVLSAYNKHRDKPIREQAENIIHLFTLTNLGAPA
AFKYFDTTIDRKRYTSTKEVLDATLIHQSITGLYETRIDLSQLGGDSGGSGGSGGSYNLSDI
IEKETGKQLVIQESILMLPEEVEEVIGNKPESDILVHTAYDESTDENVMLLTSDAPEYK
PWALVIQDSNGENKIKMLSGGSGGSGGSTNLSDIIEKETGKQLVIQESILMLPEEVEEV
IGNKPESDILVHTAYDESTDENVMLLTSDAPEYKPWALVIQDSNGENKIKMLSGGSK
RTADGSEFEPKKKRKV
CDA-BE4
(SEQ ID NO: 234)
MKRTADGSEFESPKKKRKVTDAEYVRIHEKLDIYTFKKQFFNNKKSVSHRCYVLFEL
KRRGERRACFWGYAVNKPQSGTERGIHAEIFSIRKVEEYLRDNPGQFTINWYSSWSP
CADCAEKILEWYNQELRGNGHTLKIWACKLYYEKNARNQIGLWNLRDNGVGLNV
MVSEHYQCCRKIFIQSSHNQLNENRWLEKTLKRAEKRRSELSIMIQVKILHTTKSPAV
SGGSSGGSSGSETPGTSESATPESSGGSSGGSDKKYSIGLAIGTNSVGWAVITDEYKVPSK
KFKVLGNTDRHSIKKNLIGALLFDSGETAEATRLKRTARRRYTRRKNRICYLQEIFSNEMAK
VDDSFFHRLEESFLVEEDKKHERHPIFGNIVDEVAYHEKYPTIYHLRKKLVDSTDKADLRL
IYLALAHMIKFRGHFLIEGDLNPDNSDVDKLFIQLVQTYNQLFEENPINASGVDAKAILSAR
LSKSRRLENLIAQLPGEKKNGLFGNLIALSLGLTPNFKSNFDLAEDAKLQLSKDTYDDDLD
NLLAQIGDQYADLFLAAKNLSDAILLSDILRVNTEITKAPLSASMIKRYDEHHQDLTLLKAL
VRQQLPEKYKEIFFDQSKNGYAGYIDGGASQEEFYKFIKPILEKMDGTEELLVKLNREDLL
RKQRTFDNGSIPHQIHLGELHAILRRQEDFYPFLKDNREKIEKILTFRIPYYVGPLARGNSR
FAWMTRKSEETITPWNFEEWDKGASAQSFIERMTNFDKNLPNEKVLPKHSLLYEYFTVY
NELTKVKYVTEGMRKPAFLSGEQKKAIVDLLFKTNRKVTVKQLKEDYFKKIECFDSVEISG
VEDRFNASLGTYHDLLKIIKDKDFLDNEENEDILEDIVLTLTLFEDREMIEERLKTYAHLFD
DKVMKQLKRRRYTGWGRLSRKLINGIRDKQSGKTILDFLKSDGFANRNFMQLIHDDSLTF
KEDIQKAQVSGQGDSLHEHIANLAGSPAIKKGILQTVKWDELVKVMGRHKPENIVIEMAR
ENQTTQKGQKNSRERMKRIEEGIKELGSQILKEHPVENTQLQNEKLYLYYLQNGRDMYVD
QELDINRLSDYDVDHIVPQSFLKDDSIDNKVLTRSDKNRGKSDNVPSEEWKKMKNYWRQ
LLNAKLITQRKFDNLTKAERGGLSELDKAGFIKRQLVETRQITKHVAQILDSRMNTKYDEN
DKLIREVKVITLKSKLVSDFRKDFQFYKVREINNYHHAHDAYLNAWGTALIKKYPKLESEF
VYGDYKVYDVRKMIAKSEQEIGKATAKYFFYSNIMNFFKTEITLANGEIRKRPLIETNGETG
EIVWDKGRDFATVRKVLSMPQVNIVKKTEVQTGGFSKESILPKRNSDKLIARKKDWDPKK
YGGFDSPTVAYSVLWAKVEKGKSKKLKSVKELLGITIMERSSFEKNPIDFLEAKGYKEVKK
DLIIKLPKYSLFELENGRKRMLASAGELQKGNELALPSKYVNFLYLASHYEKLKGSPEDNE
QKQLFVEQHKHYLDEIIEQISEFSKRVILADANLDKVLSAYNKHRDKPIREQAENIIHLFTLT
NLGAPAAFKYFDTTIDRKRYTSTKEVLDATLIHQSITGLYETRIDLSQLGGDSGGSGGSGGS
TNLSDIIEKETGKQLVIQESILMLPEEVEEVIGNKPESDILVHTAYDESTDENVMLLTS
DAPEYKPWALVIQDSNGENKIKMLSGGSGGSGGSTNLSDIIEKETGKQLVIQESILML
PEEVEEVIGNKPESDILVHTAYDESTDENVMLLTSDAPEYKPWALVIQDSNGENKIK
MLSGGSKRTADGSEFEPKKKRKV
FERNY-BE4
(SEQ ID NO: 235)
MKRTADGSEFESPKKKRKVFERNYDPRELRKETYLLYEIKWGKSGKLWRHWCQNN
RTQHAEVYFLENIFNARRFNPSTHCSITWYLSWSPCAECSQKIVDFLKEHPNVNLEIY
VARLYYHEDERNRQGLRDLVNSGVTIRIMDLPDYNYCWKTFVSDQGGDEDYWPGH
FAPWIKQYSLKLSGGSSGGSSGSETPGTSESATPESSGGSSGGSDKKYSIGLAIGTNSVG
WAVITDEYKVPSKKFKVLGNTDRHSIKKNLIGALLFDSGETAEATRLKRTARRRYTRRKNRI
CYLQEIFSNEMAKVDDSFFHRLEESFLVEEDKKHERHPIFGNIVDEVAYHEKYPTIYHLRK
KLVDSTDKADLRLIYLALAHMIKFRGHFLIEGDLNPDNSDVDKLFIQLVQTYNQLFEENPI
NASGVDAKAILSARLSKSRRLENLIAQLPGEKKNGLFGNLIALSLGLTPNFKSNFDLAEDAK
LQLSKDTYDDDLDNLLAQIGDQYADLFLAAKNLSDAILLSDILRVNTEITKAPLSASMIKRY
DEHHQDLTLLKALVRQQLPEKYKEIFFDQSKNGYAGYIDGGASQEEFYKFIKPILEKMDG
TEELLVKLNREDLLRKQRTFDNGSIPHQIHLGELHAILRRQEDFYPFLKDNREKIEKILTFR
IPYYVGPLARGNSRFAWMTRKSEETITPWNFEEWDKGASAQSFIERMTNFDKNLPNEKVL
PKHSLLYEYFTVYNELTKVKYVTEGMRKPAFLSGEQKKAIVDLLFKTNRKVTVKQLKEDYF
KKIECFDSVEISGVEDRFNASLGTYHDLLKIIKDKDFLDNEENEDILEDIVLTLTLFEDREM
IEERLKTYAHLFDDKVMKQLKRRRYTGWGRLSRKLINGIRDKQSGKTILDFLKSDGFANR
NFMQLIHDDSLTFKEDIQKAQVSGQGDSLHEHIANLAGSPAIKKGILQTVKWDELVKVM
GRHKPENIVIEMARENQTTQKGQKNSRERMKRIEEGIKELGSQILKEHPVENTQLQNEKL
YLYYLQNGRDMYVDQELDINRLSDYDVDHIVPQSFLKDDSIDNKVLTRSDKNRGKSDNVP
SEEWKKMKNYWRQLLNAKLITQRKFDNLTKAERGGLSELDKAGFIKRQLVETRQITKHV
AQILDSRMNTKYDENDKLIREVKVITLKSKLVSDFRKDFQFYKVREINNYHHAHDAYLNAV
VGTALIKKYPKLESEFVYGDYKVYDVRKMIAKSEQEIGKATAKYFFYSNIMNFFKTEITLAN
GEIRKRPLIETNGETGEIVWDKGRDFATVRKVLSMPQVNIVKKTEVQTGGFSKESILPKRN
SDKLIARKKDWDPKKYGGFDSPTVAYSVLWAKVEKGKSKKLKSVKELLGITIMERSSFEK
NPIDFLEAKGYKEVKKDLIIKLPKYSLFELENGRKRMLASAGELQKGNELALPSKYVNFLY
LASHYEKLKGSPEDNEQKQLFVEQHKHYLDEIIEQISEFSKRVILADANLDKVLSAYNKHR
DKPIREQAENIIHLFTLTNLGAPAAFKYFDTTIDRKRYTSTKEVLDATLIHQSITGLYETRIDL
SQLGGDSGGSGGSGGSTNLSDIIEKETGKQLVIQESILMLPEEVEEVIGNKPESDILVHT
AYDESTDENVMLLTSDAPEYKPWALVIQDSNGENKIKMLSGGSGGSGGSTNLSDIIE
KETGKQLVIQESILMLPEEVEEVIGNKPESDILVHTAYDESTDENVMLLTSDAPEYKP
WALVIQDSNGENKIKMLSGGSKRTADGSEFEPKKKRKV
Evolved APOBEC3A (eA3A)-BE4
(SEQ ID NO: 236)
MKRTADGSEFESPKKKRKVEASPASGPRHLMDPHIFTSNFNNGIGRHKTYLCYEVER
LDNGTSVKMDQHRGFLHGQAKNLLCGFYGRHAELRFLDLVPSLQLDPAQIYRVTWF
ISWSPCFSWGCAGEVRAFLQENTHVRLRIFAARIYDYDPLYKEALQMLRDAGAQVSI
MTYDEFKHCWDTFVDHQGCPFQPWDGLDEHSQALSGRLRAILQNQGNSGGSSGGSS
GSETPGTSESATPESSGGSSGGSDKKYSIGLAIGTNSVGWAVITDEYKVPSKKFKVLGNTD
RHSIKKNLIGALLFDSGETAEATRLKRTARRRYTRRKNRICYLQEIFSNEMAKVDDSFFHRL
EESFLVEEDKKHERHPIFGNIVDEVAYHEKYPTIYHLRKKLVDSTDKADLRLIYLALAHMIK
FRGHFLIEGDLNPDNSDVDKLFIQLVQTYNQLFEENPINASGVDAKAILSARLSKSRRLENL
IAQLPGEKKNGLFGNLIALSLGLTPNFKSNFDLAEDAKLQLSKDTYDDDLDNLLAQIGDQ
YADLFLAAKNLSDAILLSDILRVNTEITKAPLSASMIKRYDEHHQDLTLLKALVRQQLPEKY
KEIFFDQSKNGYAGYIDGGASQEEFYKFIKPILEKMDGTEELLVKLNREDLLRKQRTFDN
GSIPHQIHLGELHAILRRQEDFYPFLKDNREKIEKILTFRIPYYVGPLARGNSRFAWMTRKS
EETITPWNFEEWDKGASAQSFIERMTNFDKNLPNEKVLPKHSLLYEYFTVYNELTKVKYV
TEGMRKPAFLSGEQKKAIVDLLFKTNRKVTVKQLKEDYFKKIECFDSVEISGVEDRFNASL
GTYHDLLKIIKDKDFLDNEENEDILEDIVLTLTLFEDREMIEERLKTYAHLFDDKVMKQLK
RRRYTGWGRLSRKLINGIRDKQSGKTILDFLKSDGFANRNFMQLIHDDSLTFKEDIQKAQ
VSGQGDSLHEHIANLAGSPAIKKGILQTVKWDELVKVMGRHKPENIVIEMARENQTTQK
GQKNSRERMKRIEEGIKELGSQILKEHPVENTQLQNEKLYLYYLQNGRDMYVDQELDINR
LSDYDVDHIVPQSFLKDDSIDNKVLTRSDKNRGKSDNVPSEEWKKMKNYWRQLLNAKLI
TQRKFDNLTKAERGGLSELDKAGFIKRQLVETRQITKHVAQILDSRMNTKYDENDKLIREV
KVITLKSKLVSDFRKDFQFYKVREINNYHHAHDAYLNAWGTALIKKYPKLESEFVYGDYK
VYDVRKMIAKSEQEIGKATAKYFFYSNIMNFFKTEITLANGEIRKRPLIETNGETGEIVWDK
GRDFATVRKVLSMPQVNIVKKTEVQTGGFSKESILPKRNSDKLIARKKDWDPKKYGGFDS
PTVAYSVLWAKVEKGKSKKLKSVKELLGITIMERSSFEKNPIDFLEAKGYKEVKKDLIIKLP
KYSLFELENGRKRMLASAGELQKGNELALPSKYVNFLYLASHYEKLKGSPEDNEQKQLFV
EQHKHYLDEIIEQISEFSKRVILADANLDKVLSAYNKHRDKPIREQAENIIHLFTLTNLGAPA
AFKYFDTTIDRKRYTSTKEVLDATLIHQSITGLYETRIDLSQLGGDSGGSGGSGGSTNESD1
IEKETGKQLVIQESILMLPEEVEEVIGNKPESDILVHTAYDESTDENVMLLTSDAPEYK
PWALVIQDSNGENKIKMLSGGSGGSGGSTNLSDIIEKETGKQLVIQESILMLPEEVEEV
IGNKPESDILVHTAYDESTDENVMLLTSDAPEYKPWALVIQDSNGENKIKMLSGGSK
RTADGSEFEPKKKRKV
AALN-BE4
(SEQ ID NO: 237)
MKRTADGSEFESPKKKRKVSSETGPVAVDPTLRRRIEPHEFEVFFDPRELAAETCLLY
EINWGGRHSIWRHTSQNTNKHVEVNFIEKFTTERYFCPNTRCSITWFLSWSPCGECSR
AITEFLSRYPHVTLFIYIARLYHLANPRNRQGLRDLISSGVTIQIMTEQESGYCWRNFV
NYSPSNEAHWPRYPHLWVRLYVLELYCIILGLPPCLNILRRKQPQLTFFTIALQSCHY
QRLPPHILWATGLKSGGSSGGSSGSETPGTSESATPESSGGSSGGSDKKYSIGLAIGTNS
VGWAVITDEYKVPSKKFKVLGNTDRHSIKKNLIGALLFDSGETAEATRLKRTARRRYTRRK
NRICYLQEIFSNEMAKVDDSFFHRLEESFLVEEDKKHERHPIFGNIVDEVAYHEKYPTIYHL
RKKLVDSTDKADLRLIYLALAHMIKFRGHFLIEGDLNPDNSDVDKLFIQLVQTYNQLFEEN
PINASGVDAKAILSARLSKSRRLENLIAQLPGEKKNGLFGNLIALSLGLTPNFKSNFDLAED
AKLQLSKDTYDDDLDNLLAQIGDQYADLFLAAKNLSDAILLSDILRVNTEITKAPLSASMIK
RYDEHHQDLTLLKALVRQQLPEKYKEIFFDQSKNGYAGYIDGGASQEEFYKFIKPILEKM
DGTEELLVKLNREDLLRKQRTFDNGSIPHQIHLGELHAILRRQEDFYPFLKDNREKIEKIL
TFRIPYYVGPLARGNSRFAWMTRKSEETITPWNFEEWDKGASAQSFIERMTNFDKNLPNE
KVLPKHSLLYEYFTVYNELTKVKYVTEGMRKPAFLSGEQKKAIVDLLFKTNRKVTVKQLKE
DYFKKIECFDSVEISGVEDRFNASLGTYHDLLKIIKDKDFLDNEENEDILEDIVLTLTLFED
REMIEERLKTYAHLFDDKVMKQLKRRRYTGWGRLSRKLINGIRDKQSGKTILDFLKSDGF
ANRNFMQLIHDDSLTFKEDIQKAQVSGQGDSLHEHIANLAGSPAIKKGILQTVKWDELVK
VMGRHKPENIVIEMARENQTTQKGQKNSRERMKRIEEGIKELGSQILKEHPVENTQLQNE
KLYLYYLQNGRDMYVDQELDINRLSDYDVDHIVPQSFLKDDSIDNKVLTRSDKNRGKSDN
VPSEEWKKMKNYWRQLLNAKLITQRKFDNLTKAERGGLSELDKAGFIKRQLVETRQITK
HVAQILDSRMNTKYDENDKLIREVKVITLKSKLVSDFRKDFQFYKVREINNYHHAHDAYLN
AWGTALIKKYPKLESEFVYGDYKVYDVRKMIAKSEQEIGKATAKYFFYSNIMNFFKTEITL
ANGEIRKRPLIETNGETGEIVWDKGRDFATVRKVLSMPQVNIVKKTEVQTGGFSKESILPK
RNSDKLIARKKDWDPKKYGGFDSPTVAYSVLWAKVEKGKSKKLKSVKELLGITIMERSSF
EKNPIDFLEAKGYKEVKKDLIIKLPKYSLFELENGRKRMLASAGELQKGNELALPSKYVNF
LYLASHYEKLKGSPEDNEQKQLFVEQHKHYLDEIIEQISEFSKRVILADANLDKVLSAYNKH
RDKPIREQAENIIHLFTLTNLGAPAAFKYFDTTIDRKRYTSTKEVLDATLIHQSITGLYETRID
LSQLGGDSGGSGGSGGSTNLSDIIEKETGKQLVIQESILMLPEEVEEVIGNKPESDILVH
TAYDESTDENVMLLTSDAPEYKPWALVIQDSNGENKIKMLSGGSGGSGGSTNLSDII
EKETGKQLVIQESILMLPEEVEEVIGNKPESDILVHTAYDESTDENVMLLTSDAPEYK
PWALVIQDSNGENKIKMLSGGSKRTADGSEFEPKKKRKV
BE4max, modified with SpCas9-NG
(SEQ ID NO: 238)
MKRTADGSEFESPKKKRKVSSETGPVAVDPTLRRRIEPHEFEVFFDPRELRKETCLLY
EINWGGRHSIWRHTSQNTNKHVEVNFIEKFTTERYFCPNTRCSITWFLSWSPCGECSR
AITEFLSRYPHVTLFIYIARLYHHADPRNRQGLRDLISSGVTIQIMTEQESGYCWRNFV
NYSPSNEAHWPRYPHLWVRLYVLELYCIILGLPPCLNILRRKQPQLTFFTIALQSCHY
QRLPPHILWATGLKSGGSSGGSSGSETPGTSESATPESSGGSSGGSDKKYSIGLAIGTNS
VGWAVITDEYKVPSKKFKVLGNTDRHSIKKNLIGALLFDSGETAEATRLKRTARRRYTRRK
NRICYLQEIFSNEMAKVDDSFFHRLEESFLVEEDKKHERHPIFGNIVDEVAYHEKYPTIYHL
RKKLVDSTDKADLRLIYLALAHMIKFRGHFLIEGDLNPDNSDVDKLFIQLVQTYNQLFEEN
PINASGVDAKAILSARLSKSRRLENLIAQLPGEKKNGLFGNLIALSLGLTPNFKSNFDLAED
AKLQLSKDTYDDDLDNLLAQIGDQYADLFLAAKNLSDAILLSDILRVNTEITKAPLSASMIK
RYDEHHQDLTLLKALVRQQLPEKYKEIFFDQSKNGYAGYIDGGASQEEFYKFIKPILEKM
DGTEELLVKLNREDLLRKQRTFDNGSIPHQIHLGELHAILRRQEDFYPFLKDNREKIEKIL
TFRIPYYVGPLARGNSRFAWMTRKSEETITPWNFEEWDKGASAQSFIERMTNFDKNLPNE
KVLPKHSLLYEYFTVYNELTKVKYVTEGMRKPAFLSGEQKKAIVDLLFKTNRKVTVKQLKE
DYFKKIECFDSVEISGVEDRFNASLGTYHDLLKIIKDKDFLDNEENEDILEDIVLTLTLFED
REMIEERLKTYAHLFDDKVMKQLKRRRYTGWGRLSRKLINGIRDKQSGKTILDFLKSDGF
ANRNFMQLIHDDSLTFKEDIQKAQVSGQGDSLHEHIANLAGSPAIKKGILQTVKWDELVK
VMGRHKPENIVIEMARENQTTQKGQKNSRERMKRIEEGIKELGSQILKEHPVENTQLQNE
KLYLYYLQNGRDMYVDQELDINRLSDYDVDHIVPQSFLKDDSIDNKVLTRSDKNRGKSDN
VPSEEWKKMKNYWRQLLNAKLITQRKFDNLTKAERGGLSELDKAGFIKRQLVETRQITK
HVAQILDSRMNTKYDENDKLIREVKVITLKSKLVSDFRKDFQFYKVREINNYHHAHDAYLN
AWGTALIKKYPKLESEFVYGDYKVYDVRKMIAKSEQEIGKATAKYFFYSNIMNFFKTEITL
ANGEIRKRPLIETNGETGEIVWDKGRDFATVRKVLSMPQVNIVKKTEVQTGGFSKESIRPK
RNSDKLIARKKDWDPKKYGGFVSPTVAYSVLWAKVEKGKSKKLKSVKELLGITIMERSSF
EKNPIDFLEAKGYKEVKKDLIIKLPKYSLFELENGRKRMLASARFLQKGNELALPSKYVNF
LYLASHYEKLKGSPEDNEQKQLFVEQHKHYLDEIIEQISEFSKRVILADANLDKVLSAYNKH
RDKPIREQAENIIHLFTLTNLGAPRAFKYFDTTIDRKVYRSTKEVLDATLIHQSITGLYETRID
LSQLGGDSGGSGGSGGSTNLSDIIEKETGKQLVIQESILMLPEEVEEVIGNKPESDILVH
TAYDESTDENVMLLTSDAPEYKPWALVIQDSNGENKIKMLSGGSGGSGGSTNLSDII
EKETGKQLVIQESILMLPEEVEEVIGNKPESDILVHTAYDESTDENVMLLTSDAPEYK
PWALVIQDSNGENKIKMLSGGSKRTADGSEFEPKKKRKV
YE1-SpCas9-NG base editor (YE1-NG)
(SEQ ID NO: 239)
MKRTADGSEFESPKKKRKVSSETGPVAVDPTLRRRIEPHEFEVFFDPRELRKETCLLY
EINWGGRHSIWRHTSQNTNKHVEVNFIEKFTTERYFCPNTRCSITWFLSYSPCGECSR
AITEFLSRYPHVTLFIYIARLYHHADPENRQGLRDLISSGVTIQIMTEQESGYCWRNFV
NYSPSNEAHWPRYPHLWVRLYVLELYCIILGLPPCLNILRRKQPQLTFFTIALQSCHY
QRLPPHILWATGLKSGGSSGGSSGSETPGTSESATPESSGGSSGGSDKKYSIGLAIGTNS
VGWAVITDEYKVPSKKFKVLGNTDRHSIKKNLIGALLFDSGETAEATRLKRTARRRYTRRK
NRICYLQEIFSNEMAKVDDSFFHRLEESFLVEEDKKHERHPIFGNIVDEVAYHEKYPTIYHL
RKKLVDSTDKADLRLIYLALAHMIKFRGHFLIEGDLNPDNSDVDKLFIQLVQTYNQLFEEN
PINASGVDAKAILSARLSKSRRLENLIAQLPGEKKNGLFGNLIALSLGLTPNFKSNFDLAED
AKLQLSKDTYDDDLDNLLAQIGDQYADLFLAAKNLSDAILLSDILRVNTEITKAPLSASMIK
RYDEHHQDLTLLKALVRQQLPEKYKEIFFDQSKNGYAGYIDGGASQEEFYKFIKPILEKM
DGTEELLVKLNREDLLRKQRTFDNGSIPHQIHLGELHAILRRQEDFYPFLKDNREKIEKIL
TFRIPYYVGPLARGNSRFAWMTRKSEETITPWNFEEWDKGASAQSFIERMTNFDKNLPNE
KVLPKHSLLYEYFTVYNELTKVKYVTEGMRKPAFLSGEQKKAIVDLLFKTNRKVTVKQLKE
DYFKKIECFDSVEISGVEDRFNASLGTYHDLLKIIKDKDFLDNEENEDILEDIVLTLTLFED
REMIEERLKTYAHLFDDKVMKQLKRRRYTGWGRLSRKLINGIRDKQSGKTILDFLKSDGF
ANRNFMQLIHDDSLTFKEDIQKAQVSGQGDSLHEHIANLAGSPAIKKGILQTVKWDELVK
VMGRHKPENIVIEMARENQTTQKGQKNSRERMKRIEEGIKELGSQILKEHPVENTQLQNE
KLYLYYLQNGRDMYVDQELDINRLSDYDVDHIVPQSFLKDDSIDNKVLTRSDKNRGKSDN
VPSEEWKKMKNYWRQLLNAKLITQRKFDNLTKAERGGLSELDKAGFIKRQLVETRQITK
HVAQILDSRMNTKYDENDKLIREVKVITLKSKLVSDFRKDFQFYKVREINNYHHAHDAYLN
AWGTALIKKYPKLESEFVYGDYKVYDVRKMIAKSEQEIGKATAKYFFYSNIMNFFKTEITL
ANGEIRKRPLIETNGETGEIVWDKGRDFATVRKVLSMPQVNIVKKTEVQTGGFSKESIRPK
RNSDKLIARKKDWDPKKYGGFVSPTVAYSVLWAKVEKGKSKKLKSVKELLGITIMERSSF
EKNPIDFLEAKGYKEVKKDLIIKLPKYSLFELENGRKRMLASARFLQKGNELALPSKYVNF
LYLASHYEKLKGSPEDNEQKQLFVEQHKHYLDEIIEQISEFSKRVILADANLDKVLSAYNKH
RDKPIREQAENIIHLFTLTNLGAPRAFKYFDTTIDRKVYRSTKEVLDATLIHQSITGLYETRID
LSQLGGDSGGSGGSGGSTNLSDIIEKETGKQLVIQESILMLPEEVEEVIGNKPESDILVH
TAYDESTDENVMLLTSDAPEYKPWALVIQDSNGENKIKMLSGGSGGSGGSTNLSDII
EKETGKQLVIQESILMLPEEVEEVIGNKPESDILVHTAYDESTDENVMLLTSDAPEYK
PWALVIQDSNGENKIKMLSGGSKRTADGSEFEPKKKRKV
YE2-SpCas9-NG base editor
(SEQ ID NO: 240)
MKRTADGSEFESPKKKRKVSSETGPVAVDPTLRRRIEPHEFEVFFDPRELRKETCLLY
EINWGGRHSIWRHTSQNTNKHVEVNFIEKFTTERYFCPNTRCSITWFLSYSPCGECSR
AITEFLSRYPHVTLFIYIARLYHHADPRNRQGLEDLISSGVTIQIMTEQESGYCWRNFV
NYSPSNEAHWPRYPHLWVRLYVLELYCIILGLPPCLNILRRKQPQLTFFTIALQSCHY
QRLPPHILWATGLKSGGSSGGSSGSETPGTSESATPESSGGSSGGSDKKYSIGLAIGTNS
VGWAVITDEYKVPSKKFKVLGNTDRHSIKKNLIGALLFDSGETAEATRLKRTARRRYTRRK
NRICYLQEIFSNEMAKVDDSFFHRLEESFLVEEDKKHERHPIFGNIVDEVAYHEKYPTIYHL
RKKLVDSTDKADLRLIYLALAHMIKFRGHFLIEGDLNPDNSDVDKLFIQLVQTYNQLFEEN
PINASGVDAKAILSARLSKSRRLENLIAQLPGEKKNGLFGNLIALSLGLTPNFKSNFDLAED
AKLQLSKDTYDDDLDNLLAQIGDQYADLFLAAKNLSDAILLSDILRVNTEITKAPLSASMIK
RYDEHHQDLTLLKALVRQQLPEKYKEIFFDQSKNGYAGYIDGGASQEEFYKFIKPILEKM
DGTEELLVKLNREDLLRKQRTFDNGSIPHQIHLGELHAILRRQEDFYPFLKDNREKIEKIL
TFRIPYYVGPLARGNSRFAWMTRKSEETITPWNFEEWDKGASAQSFIERMTNFDKNLPNE
KVLPKHSLLYEYFTVYNELTKVKYVTEGMRKPAFLSGEQKKAIVDLLFKTNRKVTVKQLKE
DYFKKIECFDSVEISGVEDRFNASLGTYHDLLKIIKDKDFLDNEENEDILEDIVLTLTLFED
REMIEERLKTYAHLFDDKVMKQLKRRRYTGWGRLSRKLINGIRDKQSGKTILDFLKSDGF
ANRNFMQLIHDDSLTFKEDIQKAQVSGQGDSLHEHIANLAGSPAIKKGILQTVKWDELVK
VMGRHKPENIVIEMARENQTTQKGQKNSRERMKRIEEGIKELGSQILKEHPVENTQLQNE
KLYLYYLQNGRDMYVDQELDINRLSDYDVDHIVPQSFLKDDSIDNKVLTRSDKNRGKSDN
VPSEEWKKMKNYWRQLLNAKLITQRKFDNLTKAERGGLSELDKAGFIKRQLVETRQITK
HVAQILDSRMNTKYDENDKLIREVKVITLKSKLVSDFRKDFQFYKVREINNYHHAHDAYLN
AWGTALIKKYPKLESEFVYGDYKVYDVRKMIAKSEQEIGKATAKYFFYSNIMNFFKTEITL
ANGEIRKRPLIETNGETGEIVWDKGRDFATVRKVLSMPQVNIVKKTEVQTGGFSKESIRPK
RNSDKLIARKKDWDPKKYGGFVSPTVAYSVLWAKVEKGKSKKLKSVKELLGITIMERSSF
EKNPIDFLEAKGYKEVKKDLIIKLPKYSLFELENGRKRMLASARFLQKGNELALPSKYVNF
LYLASHYEKLKGSPEDNEQKQLFVEQHKHYLDEIIEQISEFSKRVILADANLDKVLSAYNKH
RDKPIREQAENIIHLFTLTNLGAPRAFKYFDTTIDRKVYRSTKEVLDATLIHQSITGLYETRID
LSQLGGDSGGSGGSGGSTNLSDIIEKETGKQLVIQESILMLPEEVEEVIGNKPESDILVH
TAYDESTDENVMLLTSDAPEYKPWALVIQDSNGENKIKMLSGGSGGSGGSTNLSDII
EKETGKQLVIQESILMLPEEVEEVIGNKPESDILVHTAYDESTDENVMLLTSDAPEYK
PWALVIQDSNGENKIKMLSGGSKRTADGSEFEPKKKRKV
YEE-SpCas9-NG base editor
(SEQ ID NO: 241)
MKRTADGSEFESPKKKRKVSSETGPVAVDPTLRRRIEPHEFEVFFDPRELRKETCLLY
EINWGGRHSIWRHTSQNTNKHVEVNFIEKFTTERYFCPNTRCSITWFLSYSPCGECSR
AITEFLSRYPHVTLFIYIARLYHHADPENRQGLEDLISSGVTIQIMTEQESGYCWRNFV
NYSPSNEAHWPRYPHLWVRLYVLELYCIILGLPPCLNILRRKQPQLTFFTIALQSCHY
QRLPPHILWATGLKSGGSSGGSSGSETPGTSESATPESSGGSSGGSDKKYSIGLAIGTNS
VGWAVITDEYKVPSKKFKVLGNTDRHSIKKNLIGALLFDSGETAEATRLKRTARRRYTRRK
NRICYLQEIFSNEMAKVDDSFFHRLEESFLVEEDKKHERHPIFGNIVDEVAYHEKYPTIYHL
RKKLVDSTDKADLRLIYLALAHMIKFRGHFLIEGDLNPDNSDVDKLFIQLVQTYNQLFEEN
PINASGVDAKAILSARLSKSRRLENLIAQLPGEKKNGLFGNLIALSLGLTPNFKSNFDLAED
AKLQLSKDTYDDDLDNLLAQIGDQYADLFLAAKNLSDAILLSDILRVNTEITKAPLSASMIK
RYDEHHQDLTLLKALVRQQLPEKYKEIFFDQSKNGYAGYIDGGASQEEFYKFIKPILEKM
DGTEELLVKLNREDLLRKQRTFDNGSIPHQIHLGELHAILRRQEDFYPFLKDNREKIEKIL
TFRIPYYVGPLARGNSRFAWMTRKSEETITPWNFEEWDKGASAQSFIERMTNFDKNLPNE
KVLPKHSLLYEYFTVYNELTKVKYVTEGMRKPAFLSGEQKKAIVDLLFKTNRKVTVKQLKE
DYFKKIECFDSVEISGVEDRFNASLGTYHDLLKIIKDKDFLDNEENEDILEDIVLTLTLFED
REMIEERLKTYAHLFDDKVMKQLKRRRYTGWGRLSRKLINGIRDKQSGKTILDFLKSDGF
ANRNFMQLIHDDSLTFKEDIQKAQVSGQGDSLHEHIANLAGSPAIKKGILQTVKWDELVK
VMGRHKPENIVIEMARENQTTQKGQKNSRERMKRIEEGIKELGSQILKEHPVENTQLQNE
KLYLYYLQNGRDMYVDQELDINRLSDYDVDHIVPQSFLKDDSIDNKVLTRSDKNRGKSDN
VPSEEWKKMKNYWRQLLNAKLITQRKFDNLTKAERGGLSELDKAGFIKRQLVETRQITK
HVAQILDSRMNTKYDENDKLIREVKVITLKSKLVSDFRKDFQFYKVREINNYHHAHDAYLN
AWGTALIKKYPKLESEFVYGDYKVYDVRKMIAKSEQEIGKATAKYFFYSNIMNFFKTEITL
ANGEIRKRPLIETNGETGEIVWDKGRDFATVRKVLSMPQVNIVKKTEVQTGGFSKESIRPK
RNSDKLIARKKDWDPKKYGGFVSPTVAYSVLWAKVEKGKSKKLKSVKELLGITIMERSSF
EKNPIDFLEAKGYKEVKKDLIIKLPKYSLFELENGRKRMLASARFLQKGNELALPSKYVNF
LYLASHYEKLKGSPEDNEQKQLFVEQHKHYLDEIIEQISEFSKRVILADANLDKVLSAYNKH
RDKPIREQAENIIHLFTLTNLGAPRAFKYFDTTIDRKVYRSTKEVLDATLIHQSITGLYETRID
LSQLGGDSGGSGGSGGSTNLSDIIEKETGKQLVIQESILMLPEEVEEVIGNKPESDILVH
TAYDESTDENVMLLTSDAPEYKPWALVIQDSNGENKIKMLSGGSGGSGGSTNLSDII
EKETGKQLVIQESILMLPEEVEEVIGNKPESDILVHTAYDESTDENVMLLTSDAPEYK
PWALVIQDSNGENKIKMLSGGSKRTADGSEFEPKKKRKV
EE-SpCas9-NG base editor
(SEQ ID NO: 242)
MKRTADGSEFESPKKKRKVSSETGPVAVDPTLRRRIEPHEFEVFFDPRELRKETCLLY
EINWGGRHSIWRHTSQNTNKHVEVNFIEKFTTERYFCPNTRCSITWFLSWSPCGECSR
AITEFLSRYPHVTLFIYIARLYHHADPENRQGLEDLISSGVTIQIMTEQESGYCWRNFV
NYSPSNEAHWPRYPHLWVRLYVLELYCIILGLPPCLNILRRKQPQLTFFTIALQSCHY
QRLPPHILWATGLKSGGSSGGSSGSETPGTSESATPESSGGSSGGSDKKYSIGLAIGTNS
VGWAVITDEYKVPSKKFKVLGNTDRHSIKKNLIGALLFDSGETAEATRLKRTARRRYTRRK
NRICYLQEIFSNEMAKVDDSFFHRLEESFLVEEDKKHERHPIFGNIVDEVAYHEKYPTIYHL
RKKLVDSTDKADLRLIYLALAHMIKFRGHFLIEGDLNPDNSDVDKLFIQLVQTYNQLFEEN
PINASGVDAKAILSARLSKSRRLENLIAQLPGEKKNGLFGNLIALSLGLTPNFKSNFDLAED
AKLQLSKDTYDDDLDNLLAQIGDQYADLFLAAKNLSDAILLSDILRVNTEITKAPLSASMIK
RYDEHHQDLTLLKALVRQQLPEKYKEIFFDQSKNGYAGYIDGGASQEEFYKFIKPILEKM
DGTEELLVKLNREDLLRKQRTFDNGSIPHQIHLGELHAILRRQEDFYPFLKDNREKIEKIL
TFRIPYYVGPLARGNSRFAWMTRKSEETITPWNFEEWDKGASAQSFIERMTNFDKNLPNE
KVLPKHSLLYEYFTVYNELTKVKYVTEGMRKPAFLSGEQKKAIVDLLFKTNRKVTVKQLKE
DYFKKIECFDSVEISGVEDRFNASLGTYHDLLKIIKDKDFLDNEENEDILEDIVLTLTLFED
REMIEERLKTYAHLFDDKVMKQLKRRRYTGWGRLSRKLINGIRDKQSGKTILDFLKSDGF
ANRNFMQLIHDDSLTFKEDIQKAQVSGQGDSLHEHIANLAGSPAIKKGILQTVKWDELVK
VMGRHKPENIVIEMARENQTTQKGQKNSRERMKRIEEGIKELGSQILKEHPVENTQLQNE
KLYLYYLQNGRDMYVDQELDINRLSDYDVDHIVPQSFLKDDSIDNKVLTRSDKNRGKSDN
VPSEEWKKMKNYWRQLLNAKLITQRKFDNLTKAERGGLSELDKAGFIKRQLVETRQITK
HVAQILDSRMNTKYDENDKLIREVKVITLKSKLVSDFRKDFQFYKVREINNYHHAHDAYLN
AWGTALIKKYPKLESEFVYGDYKVYDVRKMIAKSEQEIGKATAKYFFYSNIMNFFKTEITL
ANGEIRKRPLIETNGETGEIVWDKGRDFATVRKVLSMPQVNIVKKTEVQTGGFSKESIRPK
RNSDKLIARKKDWDPKKYGGFVSPTVAYSVLWAKVEKGKSKKLKSVKELLGITIMERSSF
EKNPIDFLEAKGYKEVKKDLIIKLPKYSLFELENGRKRMLASARFLQKGNELALPSKYVNF
LYLASHYEKLKGSPEDNEQKQLFVEQHKHYLDEIIEQISEFSKRVILADANLDKVLSAYNKH
RDKPIREQAENIIHLFTLTNLGAPRAFKYFDTTIDRKVYRSTKEVLDATLIHQSITGLYETRID
LSQLGGDSGGSGGSGGSTNLSDIIEKETGKQLVIQESILMLPEEVEEVIGNKPESDILVH
TAYDESTDENVMLLTSDAPEYKPWALVIQDSNGENKIKMLSGGSGGSGGSTNLSDII
EKETGKQLVIQESILMLPEEVEEVIGNKPESDILVHTAYDESTDENVMLLTSDAPEYK
PWALVIQDSNGENKIKMLSGGSKRTADGSEFEPKKKRKV
R33A + K34A-SpCas9-NG base editor
(SEQ ID NO: 243)
MKRTADGSEFESPKKKRKVSSETGPVAVDPTLRRRIEPHEFEVFFDPRELAAETCLLY
EINWGGRHSIWRHTSQNTNKHVEVNFIEKFTTERYFCPNTRCSITWFLSWSPCGECSR
AITEFLSRYPHVTLFIYIARLYHHADPRNRQGLRDLISSGVTIQIMTEQESGYCWRNFV
NYSPSNEAHWPRYPHLWVRLYVLELYCIILGLPPCLNILRRKQPQLTFFTIALQSCHY
QRLPPHILWATGLKSGGSSGGSSGSETPGTSESATPESSGGSSGGSDKKYSIGLAIGTNS
VGWAVITDEYKVPSKKFKVLGNTDRHSIKKNLIGALLFDSGETAEATRLKRTARRRYTRRK
NRICYLQEIFSNEMAKVDDSFFHRLEESFLVEEDKKHERHPIFGNIVDEVAYHEKYPTIYHL
RKKLVDSTDKADLRLIYLALAHMIKFRGHFLIEGDLNPDNSDVDKLFIQLVQTYNQLFEEN
PINASGVDAKAILSARLSKSRRLENLIAQLPGEKKNGLFGNLIALSLGLTPNFKSNFDLAED
AKLQLSKDTYDDDLDNLLAQIGDQYADLFLAAKNLSDAILLSDILRVNTEITKAPLSASMIK
RYDEHHQDLTLLKALVRQQLPEKYKEIFFDQSKNGYAGYIDGGASQEEFYKFIKPILEKM
DGTEELLVKLNREDLLRKQRTFDNGSIPHQIHLGELHAILRRQEDFYPFLKDNREKIEKIL
TFRIPYYVGPLARGNSRFAWMTRKSEETITPWNFEEWDKGASAQSFIERMTNFDKNLPNE
KVLPKHSLLYEYFTVYNELTKVKYVTEGMRKPAFLSGEQKKAIVDLLFKTNRKVTVKQLKE
DYFKKIECFDSVEISGVEDRFNASLGTYHDLLKIIKDKDFLDNEENEDILEDIVLTLTLFED
REMIEERLKTYAHLFDDKVMKQLKRRRYTGWGRLSRKLINGIRDKQSGKTILDFLKSDGF
ANRNFMQLIHDDSLTFKEDIQKAQVSGQGDSLHEHIANLAGSPAIKKGILQTVKWDELVK
VMGRHKPENIVIEMARENQTTQKGQKNSRERMKRIEEGIKELGSQILKEHPVENTQLQNE
KLYLYYLQNGRDMYVDQELDINRLSDYDVDHIVPQSFLKDDSIDNKVLTRSDKNRGKSDN
VPSEEWKKMKNYWRQLLNAKLITQRKFDNLTKAERGGLSELDKAGFIKRQLVETRQITK
HVAQILDSRMNTKYDENDKLIREVKVITLKSKLVSDFRKDFQFYKVREINNYHHAHDAYLN
AWGTALIKKYPKLESEFVYGDYKVYDVRKMIAKSEQEIGKATAKYFFYSNIMNFFKTEITL
ANGEIRKRPLIETNGETGEIVWDKGRDFATVRKVLSMPQVNIVKKTEVQTGGFSKESIRPK
RNSDKLIARKKDWDPKKYGGFVSPTVAYSVLWAKVEKGKSKKLKSVKELLGITIMERSSF
EKNPIDFLEAKGYKEVKKDLIIKLPKYSLFELENGRKRMLASARFLQKGNELALPSKYVNF
LYLASHYEKLKGSPEDNEQKQLFVEQHKHYLDEIIEQISEFSKRVILADANLDKVLSAYNKH
RDKPIREQAENIIHLFTLTNLGAPRAFKYFDTTIDRKVYRSTKEVLDATLIHQSITGLYETRID
LSQLGGDSGGSGGSGGSTNLSDIIEKETGKQLVIQESILMLPEEVEEVIGNKPESDILVH
TAYDESTDENVMLLTSDAPEYKPWALVIQDSNGENKIKMLSGGSGGSGGSTNLSDII
EKETGKQLVIQESILMLPEEVEEVIGNKPESDILVHTAYDESTDENVMLLTSDAPEYK
PWALVIQDSNGENKIKMLSGGSKRTADGSEFEPKKKRKV
YE1-CP1028 base editor (YE1-BE4-CP1028, or YE1-CP)
(SEQ ID NO: 244)
MKRTADGSEFESPKKKRKVSSETGPVAVDPTLRRRIEPHEFEVFFDPRELRKETCLLY
EINWGGRHSIWRHTSQNTNKHVEVNFIEKFTTERYFCPNTRCSITWFLSYSPCGECSR
AITEFLSRYPHVTLFIYIARLYHHADPENRQGLRDLISSGVTIQIMTEQESGYCWRNFV
NYSPSNEAHWPRYPHLWVRLYVLELYCIILGLPPCLNILRRKQPQLTFFTIALQSCHY
QRLPPHILWATGLKSGGSSGGSSGSETPGTSESATPESSGGSSGGSEIGKATAKYFFYS
NIMNFFKTEITLANGEIRKRPLIETNGETGEIVWDKGRDFATVRKVLSMPQVNIVKKT
EVQTGGFSKESILPKRNSDKLIARKKDWDPKKYGGFDSPTVAYSVLVVAKVEKGKS
KKLKSVKELLGITIMERSSFEKNPIDFLEAKGYKEVKKDLIIKLPKYSLFELENGRKRM
LASAGELQKGNELALPSKYVNFLYLASHYEKLKGSPEDNEQKQLFVEQHKHYLDEII
EQISEFSKRVILADANLDKVLSAYNKHRDKPIREQAENIIHLFTLTNLGAPAAFKYFDT
TIDRKRYTSTKEVLDATLIHQSITGLYETRIDLSQLGGDGGSGGSGGSGGSGGSGGSG
GMDKKYSIGLAIGTNSVGWAVITDEYKVPSKKFKVLGNTDRHSIKKNLIGALLFDSGETAE
ATRLKRTARRRYTRRKNRICYLQEIFSNEMAKVDDSFFHRLEESFLVEEDKKHERHPIFGNI
VDEVAYHEKYPTIYHLRKKLVDSTDKADLRLIYLALAHMIKFRGHFLIEGDLNPDNSDVDK
LFIQLVQTYNQLFEENPINASGVDAKAILSARLSKSRRLENLIAQLPGEKKNGLFGNLIALSL
GLTPNFKSNFDLAEDAKLQLSKDTYDDDLDNLLAQIGDQYADLFLAAKNLSDAILLSDILR
VNTEITKAPLSASMIKRYDEHHQDLTLLKALVRQQLPEKYKEIFFDQSKNGYAGYIDGGAS
QEEFYKFIKPILEKMDGTEELLVKLNREDLLRKQRTFDNGSIPHQIHLGELHAILRRQEDF
YPFLKDNREKIEKILTFRIPYYVGPLARGNSRFAWMTRKSEETITPWNFEEWDKGASAQSF
IERMTNFDKNLPNEKVLPKHSLLYEYFTVYNELTKVKYVTEGMRKPAFLSGEQKKAIVDLL
FKTNRKVTVKQLKEDYFKKIECFDSVEISGVEDRFNASLGTYHDLLKIIKDKDFLDNEENE
DILEDIVLTLTLFEDREMIEERLKTYAHLFDDKVMKQLKRRRYTGWGRLSRKLINGIRDKQ
SGKTILDFLKSDGFANRNFMQLIHDDSLTFKEDIQKAQVSGQGDSLHEHIANLAGSPAIKK
GILQTVKWDELVKVMGRHKPENIVIEMARENQTTQKGQKNSRERMKRIEEGIKELGSQIL
KEHPVENTQLQNEKLYLYYLQNGRDMYVDQELDINRLSDYDVDHIVPQSFLKDDSIDNKV
LTRSDKNRGKSDNVPSEEWKKMKNYWRQLLNAKLITQRKFDNLTKAERGGLSELDKAG
FIKRQLVETRQITKHVAQILDSRMNTKYDENDKLIREVKVITLKSKLVSDFRKDFQFYKVRE
INNYHHAHDAYLNAWGTALIKKYPKLESEFVYGDYKVYDVRKMIAKSEQSGGSGGSGGS
TNLSDIIEKETGKQLVIQESILMLPEEVEEVIGNKPESDILVHTAYDESTDENVMLLTS
DAPEYKPWALVIQDSNGENKIKMLSGGSGGSGGSTNLSDIIEKETGKQLVIQESILML
PEEVEEVIGNKPESDILVHTAYDESTDENVMLLTSDAPEYKPWALVIQDSNGENKIK
MLSGGSKRTADGSEFEPKKKRKV
YE2-CP1028 base editor (YE2-BE4-CP1028)
(SEQ ID NO: 245)
MKRTADGSEFESPKKKRKVSSETGPVAVDPTLRRRIEPHEFEVFFDPRELRKETCLLY
EINWGGRHSIWRHTSQNTNKHVEVNFIEKFTTERYFCPNTRCSITWFLSYSPCGECSR
AITEFLSRYPHVTLFIYIARLYHHADPRNRQGLEDLISSGVTIQIMTEQESGYCWRNFV
NYSPSNEAHWPRYPHLWVRLYVLELYCIILGLPPCLNILRRKQPQLTFFTIALQSCHY
QRLPPHILWATGLKSGGSSGGSSGSETPGTSESATPESSGGSSGGSEIGKATAKYFFYS
NIMNFFKTEITLANGEIRKRPLIETNGETGEIVWDKGRDFATVRKVLSMPQVNIVKKT
EVQTGGFSKESILPKRNSDKLIARKKDWDPKKYGGFDSPTVAYSVLVVAKVEKGKS
KKLKSVKELLGITIMERSSFEKNPIDFLEAKGYKEVKKDLIIKLPKYSLFELENGRKRM
LASAGELQKGNELALPSKYVNFLYLASHYEKLKGSPEDNEQKQLFVEQHKHYLDEII
EQISEFSKRVILADANLDKVLSAYNKHRDKPIREQAENIIHLFTLTNLGAPAAFKYFDT
TIDRKRYTSTKEVLDATLIHQSITGLYETRIDLSQLGGDGGSGGSGGSGGSGGSGGSG
GMDKKYSIGLAIGTNSVGWAVITDEYKVPSKKFKVLGNTDRHSIKKNLIGALLFDSGETAE
ATRLKRTARRRYTRRKNRICYLQEIFSNEMAKVDDSFFHRLEESFLVEEDKKHERHPIFGNI
VDEVAYHEKYPTIYHLRKKLVDSTDKADLRLIYLALAHMIKFRGHFLIEGDLNPDNSDVDK
LFIQLVQTYNQLFEENPINASGVDAKAILSARLSKSRRLENLIAQLPGEKKNGLFGNLIALSL
GLTPNFKSNFDLAEDAKLQLSKDTYDDDLDNLLAQIGDQYADLFLAAKNLSDAILLSDILR
VNTEITKAPLSASMIKRYDEHHQDLTLLKALVRQQLPEKYKEIFFDQSKNGYAGYIDGGAS
QEEFYKFIKPILEKMDGTEELLVKLNREDLLRKQRTFDNGSIPHQIHLGELHAILRRQEDF
YPFLKDNREKIEKILTFRIPYYVGPLARGNSRFAWMTRKSEETITPWNFEEWDKGASAQSF
IERMTNFDKNLPNEKVLPKHSLLYEYFTVYNELTKVKYVTEGMRKPAFLSGEQKKAIVDLL
FKTNRKVTVKQLKEDYFKKIECFDSVEISGVEDRFNASLGTYHDLLKIIKDKDFLDNEENE
DILEDIVLTLTLFEDREMIEERLKTYAHLFDDKVMKQLKRRRYTGWGRLSRKLINGIRDKQ
SGKTILDFLKSDGFANRNFMQLIHDDSLTFKEDIQKAQVSGQGDSLHEHIANLAGSPAIKK
GILQTVKWDELVKVMGRHKPENIVIEMARENQTTQKGQKNSRERMKRIEEGIKELGSQIL
KEHPVENTQLQNEKLYLYYLQNGRDMYVDQELDINRLSDYDVDHIVPQSFLKDDSIDNKV
LTRSDKNRGKSDNVPSEEWKKMKNYWRQLLNAKLITQRKFDNLTKAERGGLSELDKAG
FIKRQLVETRQITKHVAQILDSRMNTKYDENDKLIREVKVITLKSKLVSDFRKDFQFYKVRE
INNYHHAHDAYLNAWGTALIKKYPKLESEFVYGDYKVYDVRKMIAKSEQSGGSGGSGGS
TNLSDIIEKETGKQLVIQESILMLPEEVEEVIGNKPESDILVHTAYDESTDENVMLLTS
DAPEYKPWALVIQDSNGENKIKMLSGGSGGSGGSTNLSDIIEKETGKQLVIQESILML
PEEVEEVIGNKPESDILVHTAYDESTDENVMLLTSDAPEYKPWALVIQDSNGENKIK
MLSGGSKRTADGSEFEPKKKRKV
YEE-CP1028 base editor (YEE-BE4-CP1028)
(SEQ ID NO: 246)
MKRTADGSEFESPKKKRKVSSETGPVAVDPTLRRRIEPHEFEVFFDPRELRKETCLLY
EINWGGRHSIWRHTSQNTNKHVEVNFIEKFTTERYFCPNTRCSITWFLSYSPCGECSR
AITEFLSRYPHVTLFIYIARLYHHADPENRQGLEDLISSGVTIQIMTEQESGYCWRNFV
NYSPSNEAHWPRYPHLWVRLYVLELYCIILGLPPCLNILRRKQPQLTFFTIALQSCHY
QRLPPHILWATGLKSGGSSGGSSGSETPGTSESATPESSGGSSGGSEIGKATAKYFFYS
NIMNFFKTEITLANGEIRKRPLIETNGETGEIVWDKGRDFATVRKVLSMPQVNIVKKT
EVQTGGFSKESILPKRNSDKLIARKKDWDPKKYGGFDSPTVAYSVLVVAKVEKGKS
KKLKSVKELLGITIMERSSFEKNPIDFLEAKGYKEVKKDLIIKLPKYSLFELENGRKRM
LASAGELQKGNELALPSKYVNFLYLASHYEKLKGSPEDNEQKQLFVEQHKHYLDEII
EQISEFSKRVILADANLDKVLSAYNKHRDKPIREQAENIIHLFTLTNLGAPAAFKYFDT
TIDRKRYTSTKEVLDATLIHQSITGLYETRIDLSQLGGDGGSGGSGGSGGSGGSGGSG
GMDKKYSIGLAIGTNSVGWAVITDEYKVPSKKFKVLGNTDRHSIKKNLIGALLFDSGETAE
ATRLKRTARRRYTRRKNRICYLQEIFSNEMAKVDDSFFHRLEESFLVEEDKKHERHPIFGNI
VDEVAYHEKYPTIYHLRKKLVDSTDKADLRLIYLALAHMIKFRGHFLIEGDLNPDNSDVDK
LFIQLVQTYNQLFEENPINASGVDAKAILSARLSKSRRLENLIAQLPGEKKNGLFGNLIALSL
GLTPNFKSNFDLAEDAKLQLSKDTYDDDLDNLLAQIGDQYADLFLAAKNLSDAILLSDILR
VNTEITKAPLSASMIKRYDEHHQDLTLLKALVRQQLPEKYKEIFFDQSKNGYAGYIDGGAS
QEEFYKFIKPILEKMDGTEELLVKLNREDLLRKQRTFDNGSIPHQIHLGELHAILRRQEDF
YPFLKDNREKIEKILTFRIPYYVGPLARGNSRFAWMTRKSEETITPWNFEEWDKGASAQSF
IERMTNFDKNLPNEKVLPKHSLLYEYFTVYNELTKVKYVTEGMRKPAFLSGEQKKAIVDLL
FKTNRKVTVKQLKEDYFKKIECFDSVEISGVEDRFNASLGTYHDLLKIIKDKDFLDNEENE
DILEDIVLTLTLFEDREMIEERLKTYAHLFDDKVMKQLKRRRYTGWGRLSRKLINGIRDKQ
SGKTILDFLKSDGFANRNFMQLIHDDSLTFKEDIQKAQVSGQGDSLHEHIANLAGSPAIKK
GILQTVKWDELVKVMGRHKPENIVIEMARENQTTQKGQKNSRERMKRIEEGIKELGSQIL
KEHPVENTQLQNEKLYLYYLQNGRDMYVDQELDINRLSDYDVDHIVPQSFLKDDSIDNKV
LTRSDKNRGKSDNVPSEEWKKMKNYWRQLLNAKLITQRKFDNLTKAERGGLSELDKAG
FIKRQLVETRQITKHVAQILDSRMNTKYDENDKLIREVKVITLKSKLVSDFRKDFQFYKVRE
INNYHHAHDAYLNAWGTALIKKYPKLESEFVYGDYKVYDVRKMIAKSEQSGGSGGSGGS
TNLSDIIEKETGKQLVIQESILMLPEEVEEVIGNKPESDILVHTAYDESTDENVMLLTS
DAPEYKPWALVIQDSNGENKIKMLSGGSGGSGGSTNLSDIIEKETGKQLVIQESILML
PEEVEEVIGNKPESDILVHTAYDESTDENVMLLTSDAPEYKPWALVIQDSNGENKIK
MLSGGSKRTADGSEFEPKKKRKV
EE-CP1028 base editor (EE-BE4-CP1028)
(SEQ ID NO: 247)
MKRTADGSEFESPKKKRKVSSETGPVAVDPTLRRRIEPHEFEVFFDPRELRKETCLLY
EINWGGRHSIWRHTSQNTNKHVEVNFIEKFTTERYFCPNTRCSITWFLSWSPCGECSR
AITEFLSRYPHVTLFIYIARLYHHADPENRQGLEDLISSGVTIQIMTEQESGYCWRNFV
NYSPSNEAHWPRYPHLWVRLYVLELYCIILGLPPCLNILRRKQPQLTFFTIALQSCHY
QRLPPHILWATGLKSGGSSGGSSGSETPGTSESATPESSGGSSGGSEIGKATAKYFFYS
NIMNFFKTEITLANGEIRKRPLIETNGETGEIVWDKGRDFATVRKVLSMPQVNIVKKT
EVQTGGFSKESILPKRNSDKLIARKKDWDPKKYGGFDSPTVAYSVLVVAKVEKGKS
KKLKSVKELLGITIMERSSFEKNPIDFLEAKGYKEVKKDLIIKLPKYSLFELENGRKRM
LASAGELQKGNELALPSKYVNFLYLASHYEKLKGSPEDNEQKQLFVEQHKHYLDEII
EQISEFSKRVILADANLDKVLSAYNKHRDKPIREQAENIIHLFTLTNLGAPAAFKYFDT
TIDRKRYTSTKEVLDATLIHQSITGLYETRIDLSQLGGDGGSGGSGGSGGSGGSGGSG
GMDKKYSIGLAIGTNSVGWAVITDEYKVPSKKFKVLGNTDRHSIKKNLIGALLFDSGETAE
ATRLKRTARRRYTRRKNRICYLQEIFSNEMAKVDDSFFHRLEESFLVEEDKKHERHPIFGNI
VDEVAYHEKYPTIYHLRKKLVDSTDKADLRLIYLALAHMIKFRGHFLIEGDLNPDNSDVDK
LFIQLVQTYNQLFEENPINASGVDAKAILSARLSKSRRLENLIAQLPGEKKNGLFGNLIALSL
GLTPNFKSNFDLAEDAKLQLSKDTYDDDLDNLLAQIGDQYADLFLAAKNLSDAILLSDILR
VNTEITKAPLSASMIKRYDEHHQDLTLLKALVRQQLPEKYKEIFFDQSKNGYAGYIDGGAS
QEEFYKFIKPILEKMDGTEELLVKLNREDLLRKQRTFDNGSIPHQIHLGELHAILRRQEDF
YPFLKDNREKIEKILTFRIPYYVGPLARGNSRFAWMTRKSEETITPWNFEEWDKGASAQSF
IERMTNFDKNLPNEKVLPKHSLLYEYFTVYNELTKVKYVTEGMRKPAFLSGEQKKAIVDLL
FKTNRKVTVKQLKEDYFKKIECFDSVEISGVEDRFNASLGTYHDLLKIIKDKDFLDNEENE
DILEDIVLTLTLFEDREMIEERLKTYAHLFDDKVMKQLKRRRYTGWGRLSRKLINGIRDKQ
SGKTILDFLKSDGFANRNFMQLIHDDSLTFKEDIQKAQVSGQGDSLHEHIANLAGSPAIKK
GILQTVKWDELVKVMGRHKPENIVIEMARENQTTQKGQKNSRERMKRIEEGIKELGSQIL
KEHPVENTQLQNEKLYLYYLQNGRDMYVDQELDINRLSDYDVDHIVPQSFLKDDSIDNKV
LTRSDKNRGKSDNVPSEEWKKMKNYWRQLLNAKLITQRKFDNLTKAERGGLSELDKAG
FIKRQLVETRQITKHVAQILDSRMNTKYDENDKLIREVKVITLKSKLVSDFRKDFQFYKVRE
INNYHHAHDAYLNAWGTALIKKYPKLESEFVYGDYKVYDVRKMIAKSEQSGGSGGSGGS
TNLSDIIEKETGKQLVIQESILMLPEEVEEVIGNKPESDILVHTAYDESTDENVMLLTS
DAPEYKPWALVIQDSNGENKIKMLSGGSGGSGGSTNLSDIIEKETGKQLVIQESILML
PEEVEEVIGNKPESDILVHTAYDESTDENVMLLTSDAPEYKPWALVIQDSNGENKIK
MLSGGSKRTADGSEFEPKKKRKV
R33A + K34A-CP1028 base editor (R33A + K34A-BE4-CP1028)
(SEQ ID NO: 248)
MKRTADGSEFESPKKKRKVSSETGPVAVDPTLRRRIEPHEFEVFFDPRELAAETCLLY
EINWGGRHSIWRHTSQNTNKHVEVNFIEKFTTERYFCPNTRCSITWFLSWSPCGECSR
AITEFLSRYPHVTLFIYIARLYHHADPRNRQGLRDLISSGVTIQIMTEQESGYCWRNFV
NYSPSNEAHWPRYPHLWVRLYVLELYCIILGLPPCLNILRRKQPQLTFFTIALQSCHY
QRLPPHILWATGLKSGGSSGGSSGSETPGTSESATPESSGGSSGGSEIGKATAKYFFYS
NIMNFFKTEITLANGEIRKRPLIETNGETGEIVWDKGRDFATVRKVLSMPQVNIVKKT
EVQTGGFSKESILPKRNSDKLIARKKDWDPKKYGGFDSPTVAYSVLVVAKVEKGKS
KKLKSVKELLGITIMERSSFEKNPIDFLEAKGYKEVKKDLIIKLPKYSLFELENGRKRM
LASAGELQKGNELALPSKYVNFLYLASHYEKLKGSPEDNEQKQLFVEQHKHYLDEII
EQISEFSKRVILADANLDKVLSAYNKHRDKPIREQAENIIHLFTLTNLGAPAAFKYFDT
TIDRKRYTSTKEVLDATLIHQSITGLYETRIDLSQLGGDGGSGGSGGSGGSGGSGGSG
GMDKKYSIGLAIGTNSVGWAVITDEYKVPSKKFKVLGNTDRHSIKKNLIGALLFDSGETAE
ATRLKRTARRRYTRRKNRICYLQEIFSNEMAKVDDSFFHRLEESFLVEEDKKHERHPIFGNI
VDEVAYHEKYPTIYHLRKKLVDSTDKADLRLIYLALAHMIKFRGHFLIEGDLNPDNSDVDK
LFIQLVQTYNQLFEENPINASGVDAKAILSARLSKSRRLENLIAQLPGEKKNGLFGNLIALSL
GLTPNFKSNFDLAEDAKLQLSKDTYDDDLDNLLAQIGDQYADLFLAAKNLSDAILLSDILR
VNTEITKAPLSASMIKRYDEHHQDLTLLKALVRQQLPEKYKEIFFDQSKNGYAGYIDGGAS
QEEFYKFIKPILEKMDGTEELLVKLNREDLLRKQRTFDNGSIPHQIHLGELHAILRRQEDF
YPFLKDNREKIEKILTFRIPYYVGPLARGNSRFAWMTRKSEETITPWNFEEWDKGASAQSF
IERMTNFDKNLPNEKVLPKHSLLYEYFTVYNELTKVKYVTEGMRKPAFLSGEQKKAIVDLL
FKTNRKVTVKQLKEDYFKKIECFDSVEISGVEDRFNASLGTYHDLLKIIKDKDFLDNEENE
DILEDIVLTLTLFEDREMIEERLKTYAHLFDDKVMKQLKRRRYTGWGRLSRKLINGIRDKQ
SGKTILDFLKSDGFANRNFMQLIHDDSLTFKEDIQKAQVSGQGDSLHEHIANLAGSPAIKK
GILQTVKWDELVKVMGRHKPENIVIEMARENQTTQKGQKNSRERMKRIEEGIKELGSQIL
KEHPVENTQLQNEKLYLYYLQNGRDMYVDQELDINRLSDYDVDHIVPQSFLKDDSIDNKV
LTRSDKNRGKSDNVPSEEWKKMKNYWRQLLNAKLITQRKFDNLTKAERGGLSELDKAG
FIKRQLVETRQITKHVAQILDSRMNTKYDENDKLIREVKVITLKSKLVSDFRKDFQFYKVRE
INNYHHAHDAYLNAWGTALIKKYPKLESEFVYGDYKVYDVRKMIAKSEQSGGSGGSGGS
TNLSDIIEKETGKQLVIQESILMLPEEVEEVIGNKPESDILVHTAYDESTDENVMLLTS
DAPEYKPWALVIQDSNGENKIKMLSGGSGGSGGSTNLSDIIEKETGKQLVIQESILML
PEEVEEVIGNKPESDILVHTAYDESTDENVMLLTSDAPEYKPWALVIQDSNGENKIK
MLSGGSKRTADGSEFEPKKKRKV

[0630] These disclosed CBEs exhibit low off-target editing frequencies, and in particular low Cas9-independent off-target editing frequencies, while exhibiting high on-target editing efficiencies. For example, the YE1-BE4, YE1-CP1028, YE1-SpCas9-NG, R33A-BE4, and R33A+K34A-BE4-CP1028 base editors may exhibit off-target editing frequencies of less than 0.75% (e.g., about 0.4% or less) while maintaining on-target editing efficiencies of about 60% or more, in target sequences in mammalian cells. (See, e.g., FIGS. 11, 15A, 15B and 17.) The Examples of the present disclosure suggest that CBEs with cytosine deaminases that have a low intrinsic catalytic efficiency (k_{cat}/Kₘ) for cytosine-containing ssDNA substrates exhibit reduced Cas9-independent off-target deamination.

[0631] In some embodiments, the fusion protein comprises an amino acid sequence that is at least 60%, at least 65%, at least 70%, at least 75%, at least 80%, at least 85%, at least 90%, at least 95%, at least 96%, at least 97%, at least 98%, at least 99%, or at least 99.5% identical to any one of the amino acid sequences set forth in any one of SEQ ID NOs: 223-248, or to any of the fusion proteins provided herein. In some embodiments, the fusion protein comprises an amino acid sequence that has 1, 2, 3, 4, 5, 6, 7, 8, 9, 10, 11, 12, 13, 14, 15, 16, 17, 18, 19, 20, 21, 22, 21, 24, 25, 26, 27, 28, 29, 30, 31, 32, 33, 34, 35, 36, 37, 38, 39, 40, 41, 42, 43, 44, 45, 46, 47, 48, 49, 50, or more mutations compared to any one of the amino acid sequences set forth in SEQ ID NOs: 223-248, or any of the fusion proteins provided herein. In some embodiments, the fusion protein comprises an amino acid sequence that has at least 5, at least 10, at least 15, at least 20, at least 25, at least 30, at least 35, at least 40, at least 45, at least 50, at least 60, at least 70, at least 80, at least 90, at least 100, at least 110, at least 120, at least 130, at least 140, at least 150, at least 160, at least 170, at least 200, at least 300, at least 400, at least 500, at least 600, at least 700, at least 800, at least 900, at least 1000, at least 1100, at least 1200, at least 1300, at least 1400, at least 1500, at least 1600, at least 1700, at least 1750, or at least 1800 identical contiguous amino acid residues as compared to any one of the amino acid sequences set forth in SEQ ID NOs: 223-248, or any of the fusion proteins provided herein. In some embodiments, the fusion protein (base editor) comprises the amino acid sequence of SEQ ID NO: 223, or a variant thereof that is at least 60%, at least 65%, at least 70%, at least 75%, at least 80%, at least 85%, at least 90%, at least 95%, at least 96%, at least 97%, at least 98%, at least 99%, or at least 99.5% identical.

[0632] In some embodiments, the base editor fusion proteins provided herein are capable of modifying a specific nucleotide base without generating a significant proportion of indels. An “indel”, as used herein, refers to the insertion or deletion of a nucleotide base within a nucleic acid. Such insertions or deletions can lead to frame shift mutations within a coding region of a gene. In some embodiments, it is desirable to generate base editors that efficiently modify (e.g. mutate or deaminate) a specific nucleotide within a nucleic acid, without generating a large number of insertions or deletions (i.e., indels) in the nucleic acid. In certain embodiments, any of the base editors provided herein are capable of generating a greater proportion of intended modifications (e.g., point mutations or deaminations) versus indels. In some embodiments, the base editors provided herein are capable of generating a ratio of intended point mutations to indels that is greater than 1:1. In some embodiments, the base editors provided herein are capable of generating a ratio of intended point mutations to indels that is at least 1.5:1, at least 2:1, at least 2.5:1, at least 3:1, at least 3.5:1, at least 4:1, at least 4.5:1, at least 5:1, at least 5.5:1, at least 6:1, at least 6.5:1, at least 7:1, at least 7.5:1, at least 8:1, at least 10:1, at least 12:1, at least 15:1, at least 20:1, at least 25:1, at least 30:1, at least 40:1, at least 50:1, at least 100:1, at least 200:1, at least 300:1, at least 400:1, at least 500:1, at least 600:1, at least 700:1, at least 800:1, at least 900:1, or at least 1000:1, or more. The number of intended mutations and indels may be determined using any suitable method. In some embodiments, to calculate indel frequencies, sequencing reads are scanned for exact matches to two 10-bp sequences that flank both sides of a window in which indels might occur. If no exact matches are located, the read is excluded from analysis. If the length of this indel window exactly matches the reference sequence the read is classified as not containing an indel. If the indel window is two or more bases longer or shorter than the reference sequence, then the sequencing read is classified as an insertion or deletion, respectively.

[0633] In some embodiments, the base editors provided herein are capable of limiting formation of indels in a region of a nucleic acid. In some embodiments, the region is at a nucleotide targeted by a base editor or a region within 2, 3, 4, 5, 6, 7, 8, 9, or 10 nucleotides of a nucleotide targeted by a base editor. In some embodiments, any of the base editors provided herein are capable of limiting the formation of indels at a region of a nucleic acid to less than 1%, less than 1.5%, less than 2%, less than 2.5%, less than 3%, less than 3.5%, less than 4%, less than 4.5%, less than 5%, less than 6%, less than 7%, less than 8%, less than 9%, less than 10%, less than 12%, less than 15%, or less than 20%. The number of indels formed at a nucleic acid region may depend on the amount of time a nucleic acid (e.g., a nucleic acid within the genome of a cell) is exposed to a base editor. In some embodiments, an number or proportion of indels is determined after at least 1 hour, at least 2 hours, at least 6 hours, at least 12 hours, at least 24 hours, at least 36 hours, at least 48 hours, at least 3 days, at least 4 days, at least 5 days, at least 7 days, at least 10 days, or at least 14 days of exposing a nucleic acid (e.g., a nucleic acid within the genome of a cell) to a base editor.

[0634] Some aspects of the disclosure are based on the recognition that any of the base editors provided herein are capable of efficiently generating an intended mutation, such as a point mutation, in a nucleic acid (e.g. a nucleic acid within a genome of a subject) without generating a significant number of unintended mutations, such as unintended point mutations. In some embodiments, an intended mutation is a mutation that is generated by a specific base editor bound to a gRNA, specifically designed to generate the intended mutation. In some embodiments, the intended mutation is a mutation associated with a disease or disorder. In some embodiments, the intended mutation is an adenine (A) to guanine (G) point mutation associated with a disease or disorder. In some embodiments, the intended mutation is a thymine (T) to cytosine (C) point mutation associated with a disease or disorder. In some embodiments, the intended mutation is an adenine (A) to guanine (G) point mutation within the coding region of a gene. In some embodiments, the intended mutation is a thymine (T) to cytosine (C) point mutation within the coding region of a gene. In some embodiments, the intended mutation is a point mutation that generates a stop codon, for example, a premature stop codon within the coding region of a gene. In some embodiments, the intended mutation is a mutation that eliminates a stop codon. In some embodiments, the intended mutation is a mutation that alters the splicing of a gene. In some embodiments, the intended mutation is a mutation that alters the regulatory sequence of a gene (e.g., a gene promotor or gene repressor). In some embodiments, any of the base editors provided herein are capable of generating a ratio of intended mutations to unintended mutations (e.g., intended point mutations:unintended point mutations) that is greater than 1:1. In some embodiments, any of the base editors provided herein are capable of generating a ratio of intended mutations to unintended mutations (e.g., intended point mutations:unintended point mutations) that is at least 1.5:1, at least 2:1, at least 2.5:1, at least 3:1, at least 3.5:1, at least 4:1, at least 4.5:1, at least 5:1, at least 5.5:1, at least 6:1, at least 6.5:1, at least 7:1, at least 7.5:1, at least 8:1, at least 10:1, at least 12:1, at least 15:1, at least 20:1, at least 25:1, at least 30:1, at least 40:1, at least 50:1, at least 100:1, at least 150:1, at least 200:1, at least 250:1, at least 500:1, or at least 1000:1, or more.

[0635] VII. gRNAs

[0636] Some aspects of the invention relate to guide sequences (“guide RNA” or “gRNA”) that are capable of guiding a napDNAbp or a base editor comprising a napDNAbp to a target site in a gene or target sequence (e.g., a C840T point mutation in SMN2). In various embodiments base editors (e.g., base editors provided herein) can be complexed, bound, or otherwise associated with (e.g., via any type of covalent or non-covalent bond) one or more guide sequences, i.e., the sequence which becomes associated or bound to the base editor and directs its localization to a specific target sequence having complementarity to the guide sequence or a portion thereof. The particular design aspects of a guide sequence will depend upon the nucleotide sequence of a genomic target site of interest (e.g., the mutant T840 residue of human SMN2) and the type of napDNA/RNAbp (e.g., type of Cas protein) present in the base editor, among other factors, such as PAM sequence locations, percent G/C content in the target sequence, the degree of microhomology regions, secondary structures, etc.

[0637] In certain embodiments, the present disclosure relates to guide RNA sequences that may be selected and/or predicted for use in base editing by a user of the BE-Hive algorithm. In addition, the disclosure provides guide RNAs that may be used to train the BE-Hive algorithm. Examples of specific guide RNAs that are predicted to effectively introduce edits to a target sequence of interest based on Example 1 are as follows:

### Optimized Guide RNA Spacers Identified by BE-Hive Algorithm in Example 1

[0638] The following table comprises a listing of 2,749 sgRNAs (i.e., protospacers associated therewith) selected by BE-Hive of Example 1 using at least one base editor and wherein said one at least one base editor demonstrated at least 50% correction precision to the wild-type genotype among edited reads, or at least 70% correction precision to the wild-type genotype among edited amino acid sequences.

TABLE 5

| | PROTOSPACER ASSOCIATED | SEQ |
|---|---|---|
| INDEX | WITH EACH OF 2,749 sgRNA | ID |
| NO. | SELECTED BY BE-HIVE | NO: |
| 1 | TCACGAAAAAGCCAAGATGC | 451 |
| 2 | CTGTACAGGCCACATTGAGA | 452 |
| 3 | AGAGATCCGGACAGAATCGC | 453 |
| 4 | CAGCCACATGGTGTCGCGGC | 454 |
| 5 | GGTTTTACAGAGATCCCTTC | 455 |
| 6 | CAGCCGGTGCAGGGTGCCCA | 456 |
| 7 | CACTGAGTGGTACAAGAACG | 457 |
| 8 | TGCCTATCGCCACAGCAAGC | 458 |
| 9 | AACACTGAGTGGTACAAGAA | 459 |
| 10 | TGGCTGCTCGGTCTCCAGGG | 460 |
| 11 | TTCCCAGTGGGCACAGAGGA | 461 |
| 12 | CACCGTGGTTTACACCGACA | 3224 |
| 13 | CTTCCATGGGGGCCATGAGG | 3225 |
| 14 | GTGTGACACTGATATCCGCA | 3226 |
| 15 | CTACCCGTTAAAGAATCATC | 3227 |
| 16 | TGTAGCAGGTGAAGATGATC | 3228 |
| 17 | CTTGCGTTATGATGGATTCA | 3229 |
| 18 | GAATTTGCCGGTGACCGGGG | 3230 |
| 19 | ATGTGACGGAAGAGGTTGAA | 3231 |
| 20 | GGAGCAGGGGCTCAGCAGGG | 3232 |
| 21 | CAAGGATCCGGAGGAGGTGA | 3233 |
| 22 | ATGTCGGAGGCTTGGAACTC | 3234 |
| 23 | GAGGTTCCTTGAGTCCTTTG | 3235 |
| 24 | TGAACGCAGATTCTTGTTCT | 3236 |
| 25 | CCTTCCAGAGATTCTGGGGC | 475 |
| 26 | GTTCACTGATAGCAGGAAGG | 3237 |
| 27 | CCAGCCGGTGCAGGGTGCCC | 477 |
| 28 | CAGCGGTACAGGGTGACCAC | 478 |
| 29 | TGTCCAGGCAGGAGGCCAGG | 479 |
| 30 | TGCCCTTGTGCACAATGCCC | 480 |
| 31 | CCAAATTTGGATGTTTTCAA | 481 |
| 32 | CTCGGACAAAGTTCGGGCTC | 482 |
| 33 | CAATGCAGAGTGAGGTTGGT | 483 |
| 34 | ACGGGATTTTTTCATTTCTG | 484 |
| 35 | AAAATTCGCAAGTATGTCTT | 485 |
| 36 | CATTGATGCTGGCGCCCGGC | 486 |
| 37 | ATGTAATACACACTGATTGC | 487 |
| 38 | CTGAAGCTGGTCTGACCTCA | 488 |
| 39 | ACACTAATTCCTATGAATGT | 489 |
| 40 | GAAATACGATGGGGCGCTCA | 490 |
| 41 | GAAGCAGAGGCGGTAGGCGT | 491 |
| 42 | GCTTCCGAGGCTGCACCGCA | 492 |
| 43 | TGGAATCCTTTTATATTTAG | 493 |
| 44 | GTCCGCAACGGGCTAATCCA | 494 |
| 45 | GGGTTTTACGACCAGCAGCG | 495 |
| 46 | TCCCACGGAATCCTCCAGAT | 496 |
| 47 | CAGCTACCGGACGCTGGACC | 497 |
| 48 | TCCGGGAGATGAAATGGGAT | 498 |
| 49 | TCCCGCTGGACGGCTCCGAG | 499 |
| 50 | GGACAATCCGGTGGAGCGCC | 500 |
| 51 | AGGAGCGCTATTTAGCATCG | 501 |
| 52 | CACCATTGGCCGCACACTGG | 502 |
| 53 | AATAGGAGCAGGGGCTCAGC | 503 |
| 54 | CTTGTTACAGTAATAGCTGT | 504 |
| 55 | AGCGTGGGGTATGCCGTTGT | 505 |
| 56 | AAAGTACCGGATGACCCTCT | 506 |
| 57 | GCCGAACGCATCAACACTGC | 507 |
| 58 | CTCCATGGTGTGGGCGCAGG | 508 |
| 59 | CCCTGTCTTTGGCAGCGAAA | 509 |
| 60 | ATTTTGGTACCTTTGTCCCC | 510 |
| 61 | CAGCAGAGCTTGCGGCGCCG | 511 |
| 62 | ATCCATTCCTGAATGGAACA | 512 |
| 63 | GAGGTACTCGGCAGATCCTT | 513 |
| 64 | TGTACAGGCCACATTGAGAT | 514 |
| 65 | AGTCAGTACCTGCCTGCCCA | 515 |
| 66 | ATAGACAGTGGCTGCACTTC | 516 |
| 67 | GACAGGCCCATGAAAACCAG | 517 |
| 68 | TCCGGAGGAGGTGAAGGCCA | 518 |
| 69 | ATAGCGGATCAGGGAGAAGT | 519 |
| 70 | TACCCGGATATCAAGAACTT | 520 |
| 71 | TAGAGCTCTGCTTGAAACAT | 521 |
| 72 | CGGAGGGTGAGGAGTGCAGG | 522 |
| 73 | GGCGATGTCATCACCTTTGA | 523 |
| 74 | AGTGGCCGTACAGGGAGATT | 524 |
| 75 | GTCGAGACGCTGGCCAGCTA | 525 |
| 76 | GTGACGGTGAGCTCTGCAAA | 526 |
| 77 | TTTCTACCGCAGCAGGCTAC | 527 |
| 78 | GCAGGTACCTGGGGGGCGCC | 528 |
| 79 | GTGGAGACGGACGCTGCACC | 529 |
| 80 | GTAGTACCGTGGGTACTCGA | 530 |
| 81 | TGTTTCTAACGGGACCACTG | 531 |
| 82 | GGAATTCCGGGAGATGAAAT | 532 |
| 83 | CCACCGTGGTTTACACCGAC | 533 |
| 84 | ACGGCACTGGGGGTCTTGTT | 534 |
| 85 | GTTCCCAGTGGGCACAGAGG | 535 |
| 86 | AAGGCGTGGGGAAGCATTAA | 536 |
| 87 | TGAGCCGGTGGGCCCAATGC | 537 |
| 88 | AGGTCGTGTAAAATGGATAA | 538 |
| 89 | TATGACCGGCGGCTGGAGCC | 539 |
| 90 | CTACAATTCCTACCTGTCCG | 540 |
| 91 | GTTGAATCTGTGTGTAAACG | 541 |
| 92 | ACACTGAGTGGTACAAGAAC | 542 |
| 93 | ACTAACCTGGGGCTGCCCTT | 543 |
| 94 | GATTACCATCCCTCCATTCC | 544 |
| 95 | TTCACTGTGGTCATTTTCCT | 545 |
| 96 | GCATGTCCTACATCCCGCAG | 546 |
| 97 | TACAGACGTGAATGCTTCCC | 547 |
| 98 | GAAACCGTAGAGGCAGCTGC | 548 |
| 99 | GAAATAGTACCTTTCTTGAA | 549 |
| 100 | AGACGATGGGGGGCCGCAGC | 550 |
| 101 | GGTGTTGCTGGAATGGAGAA | 551 |
| 102 | CCTGAAAAGCCCAAACTCCC | 552 |
| 103 | GTACGTGCCTGTGAACGGCA | 553 |
| 104 | AACCTCATGGGATTCAACTG | 554 |
| 105 | AACGTGAAAGAGATGCCTGT | 555 |
| 106 | GTGCTGCCGGGCATATTTTC | 556 |
| 107 | CGACAGGCCCATGAAAACCA | 557 |
| 108 | ACCGGACATCCTCAGTGCCG | 558 |
| 109 | TAACTGTGCCCATGGCCATT | 559 |
| 110 | CAGGGCTGAGGGGAGAGGAC | 560 |
| 111 | GACGCGGGCGACCGGGTAAG | 561 |
| 112 | GATCATGCCGTCGTACAAGG | 562 |
| 113 | GAACGCTGTCCACCGTGGAG | 563 |
| 114 | GAGTTTCGCTCTTGTCGCCC | 564 |
| 115 | GCTGTCCTCTCCAGCTCCAG | 565 |
| 116 | TCTGCGGGCAGCTGGTCTTC | 566 |
| 117 | GACAGAAAGTGGTAGCAAAG | 567 |
| 118 | ACGTTTCTGCTGATCGTGCT | 568 |
| 119 | CTGTGTGCGCCAGGGCTGTG | 569 |
| 120 | TGGAAGATCTATGAGGAATG | 570 |
| 121 | TCAAGCGGTTCAAGGGCAAA | 571 |
| 122 | ATCACTGCTGACGGTGGAGT | 572 |
| 123 | TATCTGTGCGAGGGTGCTCG | 573 |
| 124 | AACCGAAGGCTGGTGGCCAC | 574 |
| 125 | GGCGGGTAGAGGGTCTGCAG | 575 |
| 126 | TGCCGGAGGGTGAGGAGTGC | 576 |
| 127 | AAGGACTCCCCTTGCAATAA | 577 |
| 128 | AAAACGTGTTGGTGCTTGAG | 578 |
| 129 | TTTGGTTGGCCCTGTTGGCT | 579 |
| 130 | GACGAGGATCTCTAGGGTGG | 580 |
| 131 | TCCGAGTCAGATCTGCAATC | 581 |
| 132 | CACAGTGGGCAAGACCTCTC | 582 |
| 133 | AAGTAGCATAAATTTGTGCA | 583 |
| 134 | AAACAGAAAGCGGACAATCA | 584 |
| 135 | TCACCGAGAAGGTGCCTCTT | 585 |
| 136 | ATCGCGGACTACAACATCAT | 586 |
| 137 | AAGTATGTGCGGAGCGCCTC | 587 |
| 138 | TGGGGCTTCCTCTCGGGCCG | 588 |
| 139 | ACGGTAGTAAGTAGCCACAT | 589 |
| 140 | CTGTGAAGACTTCGAACAGC | 590 |
| 141 | GAGGTGCGCAGGCGCGTGTG | 591 |
| 142 | GTAGAAGCAGATTTTCTGCC | 592 |
| 143 | GGCTAAGGGCCACGGCAAGA | 593 |
| 144 | GCTGAACTGCAGGGGGCATG | 594 |
| 145 | AGAGCAAGCGTAGACAGCCG | 595 |
| 146 | TACGTGCCTGTGAACGGCAA | 596 |
| 147 | GTGCGGAAGAAAAACTCAGT | 597 |
| 148 | GAACGTGAAAGAGATGCCTG | 598 |
| 149 | CCAATGTCACTGTGGTGGAC | 599 |
| 150 | GAAAACGTGTTGGTGCTTGA | 600 |
| 151 | CTGCGTGACTCCGACTGGAC | 601 |
| 152 | CGGACTACAACATCATTGGC | 602 |
| 153 | ACAGATGGAAGCTATCTGAA | 603 |
| 154 | TGGATACGTCCCAGTATTTT | 604 |
| 155 | TGCAGTAGGTACGCGGCGGC | 605 |
| 156 | CCCGGATATCAAGAACTTTG | 606 |
| 157 | ACCGTACAAAAGGACAGCAG | 607 |
| 158 | CATGCTTCTGCTGATCGTGC | 608 |
| 159 | AGAAGCAGAGGCGGTAGGCG | 609 |
| 160 | TCTGGCCGGACCGAGGAACC | 610 |
| 161 | GGAGGCAAACGGGTTCCTTG | 611 |
| 162 | CGGCCGGAAGTTCGAGAAGC | 612 |
| 163 | TTCCGGGCCGGGACCGTGAT | 613 |
| 164 | TACACTGGGTGATCCTGCAA | 614 |
| 165 | GGTTTTACGACCAGCAGCGA | 615 |
| 166 | TGTTGAGGACGGAAGAGCAG | 616 |
| 167 | CACGTGCAACCTGGCCTTTG | 617 |
| 168 | TTCTTCGCGGACTGCAAACA | 618 |
| 169 | GACGGAAGAAGGATGGGCAG | 619 |
| 170 | TCCGGGTGTCATCAGCTTGT | 620 |
| 171 | CTCAACGGTACTTGTGAGCC | 621 |
| 172 | CCGTTCTTCAGGCCCATCAT | 622 |
| 173 | AAGCAAGTTTTGGTTTCATT | 623 |
| 174 | TGTGGTGGACCGGCTGTCAC | 624 |
| 175 | GGCGCTGCTGCTGAAGATGC | 625 |
| 176 | CCGTATAGGCCACATTGAGA | 626 |
| 177 | ACGGGCAAAGAAGGTGTCCA | 627 |
| 178 | ACAGTGCCTGCACCCAGCGC | 628 |
| 179 | CTGGTGGCAACAGACCCGTC | 629 |
| 180 | GAGCGTGGGGTATGCCGTTG | 630 |
| 181 | AAAGAACCTGTAGATCAAAG | 631 |
| 182 | AGGTAGATTCCAATGGCTTC | 632 |
| 183 | GTAAGTGCTGACCAAATTAC | 633 |
| 184 | AAGCATGTGTGGAGCGCCTC | 634 |
| 185 | AGGTCACTAGACATGAATAA | 635 |
| 186 | CGATGGTTGGCGGTTTAGAC | 636 |
| 187 | AGCTGAATTTGTGTGTAAAC | 637 |
| 188 | ACACAGTTCTCAAACACTGT | 638 |
| 189 | CACTGATGTGCTCCAGGGTC | 639 |
| 190 | CATCCATTCCTGAATGGAAC | 640 |
| 191 | CATCATGCCCATCCTGGAAG | 641 |
| 192 | TCATTGTCGTAGGTAAAGAA | 642 |
| 193 | AAGTCACAGTGCACGGCACA | 643 |
| 194 | GAAGGAGACGGCCTCCATGA | 644 |
| 195 | GCAAGGTGAGGTGGTGACAA | 645 |
| 196 | TTTGGCACGAATGAAAAGGT | 646 |
| 197 | AGAGGGAAACCTTTCATCAG | 647 |
| 198 | GTGTAGCGTATGCTTCCAGG | 648 |
| 199 | AAACTGGCCCTTATACCTGT | 649 |
| 200 | GATCACTGGTAACTCAGTAG | 650 |
| 201 | ATATGCGCATCTGTGGACCC | 651 |
| 202 | GGAAATACTGAAAGCAAAGA | 652 |
| 203 | TGTGTGCCGGCCCATCACTT | 653 |
| 204 | CGGCACTGGGGGTCTTGTTC | 654 |
| 205 | CCAGGCGGTCCGCAAGGCCC | 655 |
| 206 | CTGTGGTGGACTGGCTGTCA | 656 |
| 207 | CACCATCGATGTGGCCCCCT | 657 |
| 208 | GTACCTGCACTGGGCTGACT | 658 |
| 209 | CAGGCAACTGGTTTAAGAAC | 659 |
| 210 | TAGTACCGTGGGTACTCGAA | 660 |
| 211 | GGGGCCGTGACGACCAGCCC | 661 |
| 212 | GAGGTGAGCAATCTGTCAGC | 662 |
| 213 | TGTTGTTACTGGAATTAGTT | 663 |
| 214 | GCTGGTACTCGTAATCCGGG | 664 |
| 215 | ACAGAAAGTGGTAGCAAAGC | 665 |
| 216 | CTTCCGGGCCGGGACCGTGA | 666 |
| 217 | GATGGTTCCGCTCCAGGACC | 667 |
| 218 | AGAAGGAACGCTGTCCACCG | 668 |
| 219 | ACGTGAATGCTTCCCTGGAC | 669 |
| 220 | TTTGTCTGACAACAATACAT | 670 |
| 221 | GCTGGAATGGAGAATGGCCT | 671 |
| 222 | AGGAGAACTTCTGGATTTGC | 672 |
| 223 | GTGCCTCATCAAGCTACCCA | 673 |
| 224 | ATCCCGGACAGCTTCCCCAA | 674 |
| 225 | ATGCTTCTGCTGATCGTGCT | 675 |
| 226 | CACCTGTGACGGCTCTGAGG | 676 |
| 227 | TTACGCAATGGAACGCCCGA | 677 |
| 228 | AGTACCGTGGGTACTCGAAG | 678 |
| 229 | CCTCGTAGTAAATCCAGTTC | 679 |
| 230 | CCATGTGGTGGAAGAGATAT | 680 |
| 231 | CAAGGTCCGTGTCTTTTCCT | 681 |
| 232 | TCAACGGTACTTGTGAGCCA | 682 |
| 233 | AACCGGTTCTACACGCGAGC | 683 |
| 234 | TGGAATAGCGTTTGCCACAG | 684 |
| 235 | TGACGGAGGGGATGGCGCCT | 685 |
| 236 | CAGGACCAGCATCATCCCCC | 686 |
| 237 | AGCGGGCAAGGTGGCAGAGA | 687 |
| 238 | TGTCACTGAAGACCCCGAGC | 688 |
| 239 | TTCCGGGGGGCCTCAGGGCG | 689 |
| 240 | GCAGGTGAACCGTTTCCCCT | 690 |
| 241 | TATGAACGTTGGTGTCCCTT | 691 |
| 242 | AGTTGTCCCAATACCTGCTT | 692 |
| 243 | CTGCTTCGCGGGCACGGCTG | 693 |
| 244 | TCTGGTGGGCACGCAGCAGC | 694 |
| 245 | CATTCCGTTCTCAGTTTTCC | 695 |
| 246 | GGTACCTGCACTGGGCTGAC | 696 |
| 247 | CAAGCGGTTCAAGGGCAAAT | 697 |
| 248 | TGATCTCTTGGGAGAAGAAC | 698 |
| 249 | GGTGACCTACCCGGACTCAG | 699 |
| 250 | ATTCCAATGGCTTCTGGGTC | 700 |
| 251 | ACGATGAGCGCAGCGAAATT | 701 |
| 252 | TGAGGCTGGTGTCAATCCTT | 702 |
| 253 | GTTTTACAGAGATCCCTTCC | 703 |
| 254 | TGGGCCGGGGCCTTCTGGGC | 704 |
| 255 | AAGCAGATTTTCTGCCAGGT | 705 |
| 256 | AGCTGTGCGATGAAGCAGGC | 706 |
| 257 | GATCACTGGCAATTCAGTGG | 707 |
| 258 | GAGGACGAGGATCTCTAGGG | 708 |
| 259 | CACCGTGGAACTGGCCCAAC | 709 |
| 260 | CTTCACGGTGTGGGCGCAGG | 710 |
| 261 | CACGTTTCTGCTGATCGTGC | 711 |
| 262 | GGCAGGTCTCATTGAAGGTA | 712 |
| 263 | ACGACCCGCTGGACCTCACT | 713 |
| 264 | ACCTGCGGGTGCGTGGCTGC | 714 |
| 265 | AATTCCGGAGTATCGGCCAT | 715 |
| 266 | TTCTCCGGCTTAGAGGTGAC | 716 |
| 267 | GGGTCGGAATGACCCAGATA | 717 |
| 268 | CAAGGGCTGTGGCCGGCAAC | 718 |
| 269 | TGTACACAGTTGCAACACCT | 719 |
| 270 | GGTCCCGGATGTGGTGAGGA | 720 |
| 271 | GGTGGGTTACGGTCTTCAAA | 721 |
| 272 | ATACTGCCGGGAAGAAGCAA | 722 |
| 273 | GCAGCAGAGCTTGCGGCGCC | 723 |
| 274 | CTCCTGGAGGGTGCTGTTCA | 724 |
| 275 | CTGTACACAGTTGCAACACC | 725 |
| 276 | AGGTGAGCAATCTGTCAGCA | 726 |
| 277 | CTGTCCTCTCCAGCTCCAGG | 727 |
| 278 | TCCATGGGGGCCATGAGGTG | 728 |
| 279 | CATAGCGGATCAGGGAGAAG | 729 |
| 280 | GTACAGAGGTATTGTTCTTT | 730 |
| 281 | AATACGGGAAAAAGGCGTGG | 731 |
| 282 | GAAGCATGTGTGGAGCGCCT | 732 |
| 283 | AAGAACCCGGGCACGCTCTT | 733 |
| 284 | GAGGCTGGTGTCAATCCTTC | 734 |
| 285 | CCAGCGGTACAGGGTGACCA | 735 |
| 286 | TTGGCACGAATGAAAAGGTT | 736 |
| 287 | CAGCCCGGGCGGCGGCGGCG | 737 |
| 288 | ACAGCGAAATCTCGATGGAG | 738 |
| 289 | GGTGGCACTGGAAGGGGAAG | 739 |
| 290 | CCGGGAGATGAAATGGGATT | 740 |
| 291 | GTCTGATGCACTGTGTGCAG | 741 |
| 292 | GACGTTGTAGTCCACGATGC | 742 |
| 293 | TTGCACCATTGGCCGCACAC | 743 |
| 294 | GCCCTGCCGTACCCGCTGCC | 744 |
| 295 | GCGGTTCAAGGGCAAATGGG | 745 |
| 296 | TTTACGCAATGGAACGCCCG | 746 |
| 297 | TGCACAACAGCACCCGCGAC | 747 |
| 298 | GGACCGGCTGTCACGGGCTC | 748 |
| 299 | GCACTGTGTACTCCTGTGAG | 749 |
| 300 | GAAGCAGATTTTCTGCCAGG | 750 |
| 301 | GGTGACGGTGAGCTCTGCAA | 751 |
| 302 | TGTGAGATCCGCCCTTTCCA | 752 |
| 303 | CCACAGCAAACCAGTAAATC | 753 |
| 304 | TACTGAGAGCACAGCGCAGC | 754 |
| 305 | AAGCTCCGAGGTCCTGGGGG | 755 |
| 306 | CGTGTGCTGGCCCATCACTT | 756 |
| 307 | TACCGCCGTGAATGCCCGCC | 757 |
| 308 | AACCTCCACTGGGCCGACAC | 758 |
| 309 | TTACCGTGCGAAGTTAACGT | 759 |
| 310 | TGTACTTTCTCCAGCTCCAC | 760 |
| 311 | CATTCGCGGTGGACGATGGA | 761 |
| 312 | GGAACACCGTCCATTGGCAT | 762 |
| 313 | CGGATGCTGCAGGTGCACAC | 763 |
| 314 | CCGCACTCCGACCTGAGCCA | 764 |
| 315 | GCAGACCGCAAGAATACCAT | 765 |
| 316 | TCATCTGGAACAGTCTACAA | 766 |
| 317 | CTGTCTCTTCCTCTAGAGTC | 767 |
| 318 | GGGCCGATCCAGCAGGTAAG | 768 |
| 319 | GCGGCTGGCCTTGGGATTGA | 769 |
| 320 | CCGTTACCCGGAGGGCCAAC | 770 |
| 321 | GCACCGCAGCCTGGCCAGCC | 771 |
| 322 | TTGGCCCCGTTGAGTCTATC | 772 |
| 323 | CGCCGGCCACCAGCACTGCC | 773 |
| 324 | ACTTTAAGTCCCTGTTTGTG | 774 |
| 325 | TCCGGAGGTAGGACCCGGCG | 775 |
| 326 | TTCTGACAGGCAGCCTGCAC | 776 |
| 327 | TGCTCTCGATTCGACTTAAA | 777 |
| 328 | GTTCACGACAACGTGCACAG | 778 |
| 329 | TCTCGGCAACTGAGCGAATT | 779 |
| 330 | CCGAAGGCTTCAATTTCCAC | 780 |
| 331 | TTGAACCTGCAACCGGTTCT | 781 |
| 332 | GCTGATCTTCAGCCTCCTTT | 782 |
| 333 | GCACCCGCGTCTCCTGGTCG | 783 |
| 334 | GGCCAACGCATTAATACAGT | 784 |
| 335 | TGTTCTGGTCCTGCTTTGAG | 785 |
| 336 | TCATTGCAAGGGAAGTCCTT | 786 |
| 337 | TGCAAACCGGGCCTTCTCAC | 787 |
| 338 | CCGGGTCGGGCCAGTGCCCA | 788 |
| 339 | CACCACGGAGAAGCATAAAG | 789 |
| 340 | CCGCGCGCCGCTTGCGCTCC | 790 |
| 341 | AGCCGCTACCGGTGTAATGA | 791 |
| 342 | TACGATGGGGCGCTCAGGGT | 792 |
| 343 | TGCAGACCGCAAGAATACCA | 793 |
| 344 | CTACCTCCCGGAGGCCGCAG | 794 |
| 345 | GGCCCGCCCGGACGGAAGGC | 795 |
| 346 | AGCGACAGGCCTGGAAAACC | 796 |
| 347 | TACATTTACAGGTCCCACGA | 797 |
| 348 | ACAAAGCTCCGAGGTCCTGG | 798 |
| 349 | AAAATACCTCACGGGAGAGG | 799 |
| 350 | GGGCTGGCAGCGCCAGGTGA | 800 |
| 351 | AAGATCACTGGCAATTCAGT | 801 |
| 352 | CTTCACCCGGGTCATGGCGC | 802 |
| 353 | TCTTTTCATATTTAGGGGTA | 803 |
| 354 | TTCCCCGATGAGGCAGATGC | 804 |
| 355 | CGCCGAGCGGAAACTTTTGT | 805 |
| 356 | ATTGCACGTCCCTGTTCACT | 806 |
| 357 | GTACTTTCTCCAGCTCCACT | 807 |
| 358 | ACAGCGCACCGGCATCGAGG | 808 |
| 359 | CATGACTCGGGCTGCAACCA | 809 |
| 360 | AGTCCACCTGGGGAGGAAGG | 810 |
| 361 | TGAATGGCAGCCAGGGTTGC | 811 |
| 362 | GGCCTGCAGTAGGTACGCGG | 812 |
| 363 | GGCAGACCACCAGCAGCCTA | 813 |
| 364 | AGACAGCGCACCGGCATCGA | 814 |
| 365 | TCTGTCCAGGATGCTCCCAA | 815 |
| 366 | CATGCGCCGCCTCGAGGCCT | 816 |
| 367 | CCAGGCTTCCCAAGGTTACC | 817 |
| 368 | GCGCCGCCTCGAGGCCTTGG | 818 |
| 369 | CACCTTCCCGTCGGTGTATG | 819 |
| 370 | TGGTGCGGTCCCGCGGGCAG | 820 |
| 371 | CCTGCGCGGGTGGTATCAGT | 821 |
| 372 | GCACACGTCCCAACAGCTCA | 822 |
| 373 | GTCGAACGCCCGGGTGGAGG | 823 |
| 374 | CCCTGCCCTCCATCACCCAC | 824 |
| 375 | GCAGCCCGGAGCATGGGCTG | 825 |
| 376 | GTCGCCGCCCGTGGCCCCTG | 826 |
| 377 | CCACTGACAGCAGCGATGAC | 827 |
| 378 | TGCACTCGCCGTGGGTGCAG | 828 |
| 379 | CAGTGGCCGTACAGGGAGAT | 829 |
| 380 | GCGAATATCTTCTGCAATGG | 830 |
| 381 | CGTCGCCCAGGAGCTGTGGG | 831 |
| 382 | GAACACCGTCCATTGGCATG | 832 |
| 383 | TCACGTTGCAGCCGAGGTTC | 833 |
| 384 | GCACGTCGCCCAGGAGCTGT | 834 |
| 385 | TCAGTCTGGCAAAGAAGAAG | 835 |
| 386 | ATCCACCCGGGCCACCAGCC | 836 |
| 387 | GACAGCGCACCGGCATCGAG | 837 |
| 388 | AGACTTCGCTTTCCTTGGTC | 838 |
| 389 | CACCCGCAAGTCCCTGCCCA | 839 |
| 390 | CACTACTGGGGTCTCGGTCA | 840 |
| 391 | CATTCGGAAGAATGAACAGA | 841 |
| 392 | CTCTGCCTTGGATCCTAACC | 842 |
| 393 | ATCATCTGGAACAGTCTACA | 843 |
| 394 | TTCACGACAACGTGCACAGA | 844 |
| 395 | GGGCTGCTGCGCAGCGGCCG | 845 |
| 396 | GGACAACGTAGAAATACTCC | 846 |
| 397 | GAAATCCAAAGTACCTGTAG | 847 |
| 398 | TTTACCGTGCGAAGTTAACG | 848 |
| 399 | AGCCCCCTGTGTGCTCAAGG | 849 |
| 400 | AGACAGCTTCTCCTGAGAAT | 850 |
| 401 | CCAGACGTCGCCCAGGCCGA | 851 |
| 402 | AGGAACACCGTCCATTGGCA | 852 |
| 403 | GGTGCCATAGAAAAGGAGGA | 853 |
| 404 | CTCGCCGTGGGTGCAGAGGC | 854 |
| 405 | AATTCACCGTAAAGCTGGAA | 855 |
| 406 | ATGTATCAATTACAGACACT | 856 |
| 407 | TGCACACATATGTGCCAATG | 857 |
| 408 | CTGTGAGATCCGCCCTTTCC | 858 |
| 409 | CACGGGGCCTTCTACAGTGA | 859 |
| 410 | AGCACATCGCCCAAGAGCTG | 860 |
| 411 | CCGGATGAAGTAGCACACGA | 861 |
| 412 | ATACGGAGGTAATGGCATGT | 862 |
| 413 | CTTTACCCAGAGCTTCGTCC | 863 |
| 414 | CAGAAGTTGCTCAAATCCTG | 864 |
| 415 | CGACGCAGATGGTGATGCCC | 865 |
| 416 | GAGGAGCCCAATATGATCCA | 866 |
| 417 | CAGTGAAAGCACGGGCCAGC | 867 |
| 418 | CGAGCGGCTGCCGAGCCGGG | 868 |
| 419 | TGCACTTGCAGCGCCGGTTC | 869 |
| 420 | ATGTTGTCAGGGGCAATGTG | 870 |
| 421 | GTGCATGCTGCACAACTTTG | 871 |
| 422 | TACTCTTGCAGTCTGCATGC | 872 |
| 423 | TCCATTCCTGAATGGAACAG | 873 |
| 424 | CCTGCACCGGTACACGGGCG | 874 |
| 425 | TTCCGATAGGCAGCCTGCAC | 875 |
| 426 | GGATCGGCTTCACTGTGCTG | 876 |
| 427 | TTCCGGAGATTTATGTTCTA | 877 |
| 428 | CGTATAGGCCACATTGAGAT | 878 |
| 429 | TAGGCACACAGCTGACAAAG | 879 |
| 430 | ACTGGTTAGGCGGATCTGGT | 880 |
| 431 | TGCTGATGTTGCTGGACCAG | 881 |
| 432 | GGTGCGCCGCTTGGACATAC | 882 |
| 433 | TGGAGCCGGTAGCTAAAGAA | 883 |
| 434 | GGAGGCTCACGATGAGTGCC | 884 |
| 435 | ACAGAAGGAATAGGGACGAG | 885 |
| 436 | ACGACAGGAGAGGTCATAAC | 886 |
| 437 | CATGAACGCCTCCATGGTGT | 887 |
| 438 | TTTCTCGATACGGGGAGCTG | 888 |
| 439 | ATCGATCGCACCCTAAAAGC | 889 |
| 440 | AGCAGCCACGATAGCCCAGA | 890 |
| 441 | TGCTGACGAAGGTAGCAGGG | 891 |
| 442 | ACTGGAATCCAGAAACCAGT | 892 |
| 443 | CACGAAAAAGCCAAGATGCG | 893 |
| 444 | CGAGGTTGTCCAGGTGAGCC | 894 |
| 445 | CGGCTGGAGAGCATCCACCT | 895 |
| 446 | GTCCCCGCAGGGCATTGGCA | 896 |
| 447 | ATTCACCGTAAAGCTGGAAA | 897 |
| 448 | CCCCGCTCTCCATCACCCAC | 898 |
| 449 | CCACACTGGTTAGGCGGATC | 899 |
| 450 | CCTGTGCGTCCCCCAGGGGC | 900 |
| 451 | TCCACCCGGGCCACCAGCCA | 901 |
| 452 | CAGCCGCCCCTGCTGGGAGT | 902 |
| 453 | TGGGTGCCCAATAAGACCGA | 903 |
| 454 | GCCGCTGGATCCCGAAGGTG | 904 |
| 455 | GATGCGATGAAGGAGATGGG | 905 |
| 456 | ACACCCGCAAGTCCCTGCCC | 906 |
| 457 | GGCCGATCCAGCAGGTAAGT | 907 |
| 458 | TGCCACTGTCACTGTAGTCT | 908 |
| 459 | CGCCACCTGCGCGACTTCTG | 909 |
| 460 | AAGCTCCCGGACTTTTTTCT | 910 |
| 461 | ACGGCGAGTCGCATTCGTGC | 911 |
| 462 | CCTTCGCCACGCGCCTGGAC | 912 |
| 463 | ACGGAAGAGAAACTCATGAT | 913 |
| 464 | TGTGCACGATGTTGGAGGCT | 914 |
| 465 | GTCCGAGCTACAGCAAGATC | 915 |
| 466 | AACCGGCTATTGTTACCCAG | 916 |
| 467 | GCAGGAGCCCAACGTGACGG | 917 |
| 468 | GTGCACTGAGGGCCTTGGGG | 918 |
| 469 | TCCCCGTGCTGCTGGAGTTG | 919 |
| 470 | CACCATCCCGAGTGCAGACC | 920 |
| 471 | GCACGGCACCGTCACCAACT | 921 |
| 472 | GACCGCGTCCAGTTTCAGAG | 922 |
| 473 | CCGCACTGCCATCATTGCCC | 923 |
| 474 | CCAACAATGCAGAGTGAGGT | 924 |
| 475 | GGCTGATCACCTCACGCTCC | 925 |
| 476 | CAGCCTTGCCCAGTTTTCCC | 926 |
| 477 | CGATCTGAGTCATCTTCTCC | 927 |
| 478 | AGACAGAGGCAGAAATCGTG | 928 |
| 479 | CGTGCGAGTTGGCAGCGGCG | 929 |
| 480 | CGTTCGGCTTGTGGTGTAAT | 930 |
| 481 | GGTGCTCCCAGGTGGGGCCC | 931 |
| 482 | TTCGGTAACCTACAGCTCAC | 932 |
| 483 | ACCGAAGGCTGGTGGCCACA | 933 |
| 484 | CCGAAGTCGAAACCAGCGCT | 934 |
| 485 | AGCACATCTCACGGCCGCGC | 935 |
| 486 | TTCCTACTCGGACAAAGTTC | 936 |
| 487 | CAGCACAACACTGCTGCTGT | 937 |
| 488 | GACGCTGGCCAGCTACGGGC | 938 |
| 489 | CATGCTGCAGAAGACTTTGA | 939 |
| 490 | CGAAACGTGTATCTCCTCCC | 940 |
| 491 | TTAGTGACACTTGTGGGCCA | 941 |
| 492 | TTCCTCGCCCGTCAGGAGGA | 942 |
| 493 | TCCCGCTGGCCCTCGCGGCC | 943 |
| 494 | GCCGAGGAGGCTCTCTTCTG | 944 |
| 495 | CTCCCGGCGCTACGGAAGTG | 945 |
| 496 | CTGCCGCCAAAACTGAAGGC | 946 |
| 497 | GCCAACGCATTAATACAGTG | 947 |
| 498 | AAGGCCAGAATAGAAGGAAT | 948 |
| 499 | CTGTCCAGGATGCTCCCAAG | 949 |
| 500 | CTGCCGCGCGTGGCCCGAGG | 950 |
| 501 | GTACACGGCGGGCACGTTGA | 951 |
| 502 | ACCCAAACGAATATCTTGTG | 952 |
| 503 | CCTCGTAGGTGCTGGTGTCC | 953 |
| 504 | GCTGCCGCGCGTGGCCCGAG | 954 |
| 505 | AGTACACATCTCCTAACTTC | 955 |
| 506 | AGTCCACACGCATATGTGTA | 956 |
| 507 | TGCTGACGGCTCTGGTCAGC | 957 |
| 508 | TGACATGGGCATTCTGGGAA | 958 |
| 509 | GTTTAGTTCGATTTATAAGA | 959 |
| 510 | GAGAAGGCCGTGTAGGTAAG | 960 |
| 511 | GAACCCACCGGGTGACGATG | 961 |
| 512 | GCCGTCGTCGACGACGAGCG | 962 |
| 513 | ACCGTGGAACTGGCCCAACT | 963 |
| 514 | CTTTAAGTCCCTGTTTGTGC | 964 |
| 515 | GCGTATGGTCTCTTTGTTTC | 965 |
| 516 | GAGTCCTTTGCCCTTTTGAG | 966 |
| 517 | GTACTGCCTGTCTGGGGACA | 967 |
| 518 | GTGGAGCCGGTAGCTAAAGA | 968 |
| 519 | CGCCTGCACCTCTTCATGCC | 969 |
| 520 | TGAGCCTTCCGTGTTTTCAC | 970 |
| 521 | CTCATTGTTCCCGCCTTTCC | 971 |
| 522 | CTGCCGTGGGTGCAGAGGCT | 972 |
| 523 | GTTGGCCTCGGGATTGAGGG | 973 |
| 524 | CCCAGCACAGTTGGCAAACA | 974 |
| 525 | CCATCGACTGTGTGCATTTT | 975 |
| 526 | GCGTGGCTGCTCGGTCTCCA | 976 |
| 527 | TAGCACATTTGCAACAAGCT | 977 |
| 528 | TTGGCGGCTGCTGGATCCAC | 978 |
| 529 | GCAGATGACTCGGGCAAAGG | 979 |
| 530 | CCGGGCCTCGTCGCCCACAT | 980 |
| 531 | GATGCTGCCCGTGTTGAGCT | 981 |
| 532 | CCCATACGCCTGCCTTCCAA | 982 |
| 533 | CGGCGTGGAAGAGAGCATCA | 983 |
| 534 | CACGCAAAGGAAGGGCTACT | 984 |
| 535 | GCCGGAGCTTGAGAGAGACG | 985 |
| 536 | CCGTGTGGTCTCGCGATCAG | 986 |
| 537 | TGCCGCGGTGGCGCTGTCAG | 987 |
| 538 | CGTTGTTTTGGGACACCACT | 988 |
| 539 | ATTCGCGGTGGACGATGGAA | 989 |
| 540 | CCGGAGATGGCAATCGAAGC | 990 |
| 541 | CGAATCCGCACTCATCATCC | 991 |
| 542 | AAACTGCCGTTTAGATTACC | 992 |
| 543 | GCGACGCGCTCGTACTCAGA | 993 |
| 544 | GGTGTCGAACGCCCGGGTGG | 994 |
| 545 | GACGCTGGCCACGGCCACGA | 995 |
| 546 | GCGCTCTCGGCAAAGAACGC | 996 |
| 547 | GTGCGGCATTTGTCCTGCTC | 997 |
| 548 | GCCCTCGTTGCTCTCTGAGT | 998 |
| 549 | GCAGCCGCCCCTGCTGGGAG | 999 |
| 550 | GGCCGCGCATGTGTTCAGAA | 1000 |
| 551 | AGGTCCAAGGCCCAGGCTGG | 1001 |
| 552 | TTATCCGCTGCTCAAGGGAC | 1002 |
| 553 | ATGTGTTCGCGCAGGGAGCT | 1003 |
| 554 | AGCATACCGGCGGATGGTCC | 1004 |
| 555 | TGTGTTCGCGCAGGGAGCTC | 1005 |
| 556 | CGCCTCCATGGTGTGGGCGC | 1006 |
| 557 | GCACACCTTGAGGTCACGGC | 1007 |
| 558 | CCGAATGTCCTGGATTTCCA | 1008 |
| 559 | ACTCTTTGGGATCGACTTCC | 1009 |
| 560 | GGAAGCGGCGTGCTGTGCTG | 1010 |
| 561 | CGTGCCGCTAGACACGGACG | 1011 |
| 562 | AATGCGACTGCTGACAAAGA | 1012 |
| 563 | CCTGCGGGTGCGTGGCTGCA | 1013 |
| 564 | TCTACCCGGACCCTGCATAC | 1014 |
| 565 | AGAGATTCTGGGGCAGGCGT | 1015 |
| 566 | GAAAACCAATTGATGAGGTA | 1016 |
| 567 | TGCCTCATCAAGCTACCCAA | 1017 |
| 568 | GTACCTCACAAAAACAGTAG | 1018 |
| 569 | GATGAACAGCCACTGGGGCC | 1019 |
| 570 | GTGAGCGGCCTCTTTATATG | 1020 |
| 571 | CCCTGCGCGGGTGGTATCAG | 1021 |
| 572 | GCTCATGCCTGAGCTGGCCC | 1022 |
| 573 | AAGGTACACATGGTAGGATA | 1023 |
| 574 | GGTCCAAGGCCCAGGCTGGA | 1024 |
| 575 | GTGGCCGTACAGGGAGATTG | 1025 |
| 576 | GGCCTGATGGAGCCACCCCA | 1026 |
| 577 | AGAGACCGCCAACATGTCAC | 1027 |
| 578 | GTGAGATCCGCCCTTTCCAG | 1028 |
| 579 | TCGACCGGCAGACAGGCCCT | 1029 |
| 580 | CAACGTGCCGGTCTGTGTGC | 1030 |
| 581 | CTGACAGGCGTTGTCGGAGA | 1031 |
| 582 | AAAACCTACGCCATGGGTGG | 1032 |
| 583 | GCCAACAGACTGATTTCCTG | 1033 |
| 584 | AACCCCGGCTGTTGTTACCA | 1034 |
| 585 | GGCTGTCCTCTCCAGCTCCA | 1035 |
| 586 | GCAGGACCCGGAAGCCATCC | 1036 |
| 587 | ATAACGAATGCCCCATCGAT | 1037 |
| 588 | AAATTCGCAAGTATGTCTTA | 1038 |
| 589 | TCGTGGTGCCGCTACTGGGC | 1039 |
| 590 | TGGCATCGTTGATGACATTC | 1040 |
| 591 | TTGATACAAGCCCAGGAAAT | 1041 |
| 592 | AGGCTGCCACGCGGGAGACC | 1042 |
| 593 | AGAGCCCGGCCAAGTGCTGC | 1043 |
| 594 | GAAGACCGCCGAGGTGGGCG | 1044 |
| 595 | GAGGGCCCGGAGCCCCTGAG | 1045 |
| 596 | CATACAAAGAGGCCACTCAC | 1046 |
| 597 | GAGGCACAGGGCATGGGTGA | 1047 |
| 598 | TCAGTCATGCTGTCACAACT | 1048 |
| 599 | GGCACCGTGCGAGTTGGCAG | 1049 |
| 600 | GCATACCGGCGGATGGTCCA | 1050 |
| 601 | AAGAGGATCCCGGATGCTGC | 1051 |
| 602 | CTTGGCTTCCTGGGTGAGAA | 1052 |
| 603 | CATGACGCAGGCGCTGCTGG | 1053 |
| 604 | CACACGGCTGAGACGTTCCA | 1054 |
| 605 | TAAGGACCCGCAGCACCGGC | 1055 |
| 606 | GCGGCTCTGGAACCAGACCT | 1056 |
| 607 | CCGATCCGCACCTGGTGCGT | 1057 |
| 608 | GAGCTGCCCGCCGAAGAAGC | 1058 |
| 609 | CCACACCTGTGACGGCTCTG | 1059 |
| 610 | GACCCTCATCGGCAACAGCA | 1060 |
| 611 | CCACTGCGCTGCCCGCGCAG | 1061 |
| 612 | CGCCCGTGGCCCGGCTGCTG | 1062 |
| 613 | GATGCTGGCGCCCGGCTGGC | 1063 |
| 614 | GGACCATGCCTGGACGCCCA | 1064 |
| 615 | TGTCAAGAGAGCGAATGTCA | 1065 |
| 616 | CTGGCCGGACCGAGGAACCA | 1066 |
| 617 | CGCTCTCGGCAAAGAACGCT | 1067 |
| 618 | TAGATTTCCATGGGGAAGTA | 1068 |
| 619 | TGCGCCGCCTCGAGGCCTTG | 1069 |
| 620 | GCACTCCGCAGCAGTGGGCC | 1070 |
| 621 | GGCACAGTGGAAGATCTATG | 1071 |
| 622 | CTGCCGGATCCCCCTGCTGA | 1072 |
| 623 | GTACACTGGGTGATCCTGCA | 1073 |
| 624 | ATTCGGAAGAATGAACAGAA | 1074 |
| 625 | GGGGTCTCGATAATAAAATT | 1075 |
| 626 | ACATCGACTTTAAATGACTT | 1076 |
| 627 | GCCACTTCCAGAACTGCCCG | 1077 |
| 628 | CCAACCTGACCCGCTTCTTC | 1078 |
| 629 | CCTGTACCGCACGCTGTACT | 1079 |
| 630 | CGTGCCGGCCTCGCGCATGG | 1080 |
| 631 | TCACTGAGCCAGGGAACTAT | 1081 |
| 632 | CGCGCCCGGAGGAGGAAATC | 1082 |
| 633 | GCCGCTCACGCAGCTTGCGC | 1083 |
| 634 | GCGCAGTTCCTCCCGCTCGC | 1084 |
| 635 | CCTCCTTCACCTGCTTGAGG | 1085 |
| 636 | TGAACCTGCAACCGGTTCTA | 1086 |
| 637 | GCGCCTGGCCAGCCCTCCAC | 1087 |
| 638 | CATGCCGCTAGAGGAGGAAA | 1088 |
| 639 | ACGCCCGTGGTATGTTATGC | 1089 |
| 640 | TATCCGCTGCTCAAGGGACT | 1090 |
| 641 | GCGCCGAGCGGGGTTCATGT | 1091 |
| 642 | TGGCCACGACCAAGCCCGAC | 1092 |
| 643 | GCTCTTCCCGACACTGCAGC | 1093 |
| 644 | TGAAGCAGCACACGATGGCC | 1094 |
| 645 | TGCAGCAGCCGCCCTTCTGC | 1095 |
| 646 | GTGCAGCCGGGCTCGCTGCT | 1096 |
| 647 | CTCACCTCCAACATCACTGC | 1097 |
| 648 | AATACGTGCTGAAAATGATA | 1098 |
| 649 | AGAAATACGATGGGGCGCTC | 1099 |
| 650 | GCGACAGGCCTGGAAAACCA | 1100 |
| 651 | GCTCTCGCGAGCCGCCTTGG | 1101 |
| 652 | CCCACCGCTCCTGTGACAGC | 1102 |
| 653 | GACACGAAGCACACACAATA | 1103 |
| 654 | CAGCCATGGCCAGGCCCCAG | 1104 |
| 655 | CTTCCTGCTGCGGTCCCCAA | 1105 |
| 656 | TTCCGGAGTATCGGCCATGG | 1106 |
| 657 | TCCATCGTGGCCCAGGAAGG | 1107 |
| 658 | CCATGACGCAGGCGCTGCTG | 1108 |
| 659 | ACTCACGCTGGCGGTCATGC | 1109 |
| 660 | CTGCACCGGTACACGGGCGA | 1110 |
| 661 | ACAGCGGCAGCTGCCAGTGA | 1111 |
| 662 | CCAAGTTTCAGGATGCTTCT | 1112 |
| 663 | GGGCCCTGGCCCACGTACGG | 1113 |
| 664 | GCAGCCCCTCGGTCTGCAAC | 1114 |
| 665 | AAACTCCGTCCCCATGGCCG | 1115 |
| 666 | AGGCGTCGACCAGCGAGTAC | 1116 |
| 667 | GGAGACGGCCTCCATGAAGG | 1117 |
| 668 | GCCCGCCTTGTGTCCAAGAA | 1118 |
| 669 | ACTCTGCTGTTCGGAACTAC | 1119 |
| 670 | CAGTGCCGCCTGCATTCGCG | 1120 |
| 671 | GGACCCGCCTGTGGATGCAG | 1121 |
| 672 | TAAGCCCTGCCAGCCAAGCT | 1122 |
| 673 | TGCACAGGGAATTCCAAGAA | 1123 |
| 674 | CCTGCCGGCCAACTCCAAAG | 1124 |
| 675 | AGAACATCACTGGGGGCTAC | 1125 |
| 676 | CAGGTGGGGCCCGGGCATCC | 1126 |
| 677 | GGTAGATTCCAATGGCTTCT | 1127 |
| 678 | GACCACTGCGCTGCCCGCGC | 1128 |
| 679 | CCTGGGCTGCTGCGCCAGCA | 1129 |
| 680 | TGCACCTGCCGTGGGTGCAG | 1130 |
| 681 | ACGTGGTTGTGGTCGTTCTG | 1131 |
| 682 | GTACCGGACAGACGTGAGCG | 1132 |
| 683 | CACTGGGGACCGCAGCAAGA | 1133 |
| 684 | CAGGGCGTCACGGTCGGTAT | 1134 |
| 685 | TCATCCGTTTGCCTGCTAAG | 1135 |
| 686 | CTTGGCCTCGAGCCTCAGCG | 1136 |
| 687 | CGCCGCCATTACCCCGGCCA | 1137 |
| 688 | CGAGTATTCGCGCTCCGGCG | 1138 |
| 689 | TGCCACGAGCCTTCACCTTA | 1139 |
| 690 | TGCTGCACTGCCAATTGCTG | 1140 |
| 691 | GCCCTCCGTGTGCTCAAGGG | 1141 |
| 692 | GGCCCACAGGTGCAGTTCCA | 1142 |
| 693 | GATAAGTCTACCATCCTGCG | 1143 |
| 694 | GAGACCACAAGAGGCAGAGC | 1144 |
| 695 | AACCAGAGTAATAGCGGGTC | 1145 |
| 696 | TTGCTCTCGATTCGACTTAA | 1146 |
| 697 | TGCAACCTTGGCCTCGAGGG | 1147 |
| 698 | GACATCGACTTTAAATGACT | 1148 |
| 699 | AATTCACGCATTCAGACTCG | 1149 |
| 700 | TGACAGGCAGCCTGCACTGG | 1150 |
| 701 | CACACACACCACGCCCTCTT | 1151 |
| 702 | GGCGCTTCCGGGGGGCCTCA | 1152 |
| 703 | AAGCGCTCCTTCTTCGATGT | 1153 |
| 704 | TGACCGTACTGAAAAACAAA | 1154 |
| 705 | GGATTTTATCCGCTGCTCAA | 1155 |
| 706 | GGACCTGCCCAACGTGAAGA | 1156 |
| 707 | GCGGCAACGGTGTAGCGGCG | 1157 |
| 708 | GTTCGGCTTGTGGTGTAATT | 1158 |
| 709 | GACACACAGCGTGACCTGAG | 1159 |
| 710 | GAGGCGACAGAAGGAGCTCA | 1160 |
| 711 | CTGCTCAGAGGCAGGGTGTA | 1161 |
| 712 | GGGAACCCGCTGCTCACCAC | 1162 |
| 713 | AGCCGCTGGATCCCGAAGGT | 1163 |
| 714 | GAGAAGACGACCCAGGTGAG | 1164 |
| 715 | TACTCCTGTCAGCTGATTGA | 1165 |
| 716 | CCACGGGCGGCAGGCGCCCG | 1166 |
| 717 | CCGGACAGCTTCCCCAAAGG | 1167 |
| 718 | CCCGCTGGACCTCACTCGGC | 1168 |
| 719 | AGGTTACAACATCATCAGGA | 1169 |
| 720 | GGTGCACACAGAACCATTAC | 1170 |
| 721 | CCGTGCTTTCTGGAACGAGT | 1171 |
| 722 | AGAGGTTCCTTGAGTCCTTT | 1172 |
| 723 | CCAGTGCCGCCTGCATTCGC | 1173 |
| 724 | GCGGCTGTTTTGCTATGCAG | 1174 |
| 725 | CCAAGTGGCTGGCCAACTTC | 1175 |
| 726 | GGAAGGGGACCGGTCCTGGG | 1176 |
| 727 | CAAGAACAGCATTGCATACA | 1177 |
| 728 | GAAGGAGCCAGAGGAAAAAC | 1178 |
| 729 | CACGTTGACCACGATGAGGA | 1179 |
| 730 | ATCAGTCATGCTGTCACAAC | 1180 |
| 731 | AACGGTGTAGCGGCGGGGGC | 1181 |
| 732 | GCCCATGGACAGGTTCGAGG | 1182 |
| 733 | GCAGCACAACACTGCTGCTG | 1183 |
| 734 | GCCGCTACTGCTCAGCCTGC | 1184 |
| 735 | CTGGAGTACCCGCATAGCCA | 1185 |
| 736 | AACGCTGTCCACCGTGGAGC | 1186 |
| 737 | GCGGGTAGAGGGTCTGCAGC | 1187 |
| 738 | TTGCTGATGTTGCTGGACCA | 1188 |
| 739 | CGGAAGATCTATGAGGAATG | 1189 |
| 740 | GCTTGTGACATGGGCATTCT | 1190 |
| 741 | TCTCAATATCCAGGAGTTGT | 1191 |
| 742 | AGTAGGCCTTGCCAAAGCCA | 1192 |
| 743 | CCCGGAGGCCGCAGAGGAGC | 1193 |
| 744 | CAGGTGGTGACCCCGGTGCC | 1194 |
| 745 | TCCTTTTATATTTAGGGGTA | 1195 |
| 746 | CCCAACTGAGAACCAAGAAG | 1196 |
| 747 | GCCGCTAGACACGGACGCGG | 1197 |
| 748 | CCTGTTTGTGCGGGAGCCCT | 1198 |
| 749 | CTGGACGTCCACCCGCTTGG | 1199 |
| 750 | GTACAGCCCGAGAGAGAGCC | 1200 |
| 751 | CGGGCTTCTTCTCCCTACTC | 1201 |
| 752 | ACCCGGATATCAAGAACTTT | 1202 |
| 753 | GAGCTGGTGCCTGGGGCTCC | 1203 |
| 754 | GCCCAACGTGAAGATGGCCC | 1204 |
| 755 | TTTTACAGAGATCCCTTCCG | 1205 |
| 756 | CACCGCGAGGCTAGGAGGAT | 1206 |
| 757 | AAAACGTTTACAGCTTCCAG | 1207 |
| 758 | CTCCTTCACCTGCTTGAGGT | 1208 |
| 759 | CGGACAGCTTCCCCAAAGGT | 1209 |
| 760 | CCACATGCACTCGCGTGTGG | 1210 |
| 761 | CGAGTCAGATCTGCAATCTG | 1211 |
| 762 | TTCCATGGGGGCCATGAGGT | 1212 |
| 763 | TACCTGGTCCTTCTCCTCAG | 1213 |
| 764 | CGATGGAGAGGCGTGAGCGC | 1214 |
| 765 | ACGGTGACCTCAAGGCTTCT | 1215 |
| 766 | CCGAGTCAGATCTGCAATCT | 1216 |
| 767 | CGTTGCAATCCCTTAAGCAT | 1217 |
| 768 | CGGAGGGCATCCGCATCTGC | 1218 |
| 769 | GATCCTGTCATCATCATCAA | 1219 |
| 770 | CTCATACTGTGGAATGCCTG | 1220 |
| 771 | GGAAGCAAACCGCAATTCTT | 1221 |
| 772 | AGGAGCAGCCACGCTCAGTG | 1222 |
| 773 | CGGAGGGGATGGCGCCTAGG | 1223 |
| 774 | CCGGGGCTGCCCCTGGACGC | 1224 |
| 775 | ATGTTCGACAGCGGAAACCC | 1225 |
| 776 | CGCGAGAAATCTCGAACCAG | 1226 |
| 777 | GCCCAATTCCTTTAGCAATG | 1227 |
| 778 | CCCGGGTCTGGGACAGGACC | 1228 |
| 779 | GCCCTGTGCCCTGCGAGCCA | 1229 |
| 780 | GACCGGAGGAGAACTACTGC | 1230 |
| 781 | TACAGTGTTCCTAAAAGGCA | 1231 |
| 782 | CTCACGCAGCTTGCGCAGGT | 1232 |
| 783 | AGCCCGACCCACATCAAGGC | 1233 |
| 784 | CCCTGCCTCGCGCATTCGGC | 1234 |
| 785 | TAGGCACGTCAGACCCGAAC | 1235 |
| 786 | TTTCAGCCTTAGAAATACAC | 1236 |
| 787 | CGTGACGAAGGCTATGAAAG | 1237 |
| 788 | CCAGCATCATCCCCCAGGTG | 1238 |
| 789 | TATCACTCTTGAGGTCTCTG | 1239 |
| 790 | CCCTGAGGCAGACGAGGCAC | 1240 |
| 791 | AAGCCGCTGGATCCCGAAGG | 1241 |
| 792 | AAACCGCAAGTTTGGCTTTT | 1242 |
| 793 | CGCACTGCCATCATTGCCCA | 1243 |
| 794 | CCAGGCAGGAGGCTCGGGTG | 1244 |
| 795 | GTGGAGGACACGCAAAGGAA | 1245 |
| 796 | GGCGTAGTCCTTCCCAGAGA | 1246 |
| 797 | CTACCTGTCCGGGGTGCTGC | 1247 |
| 798 | GCGCCACATGCACTCGCGTG | 1248 |
| 799 | GGAGGCACAGGGCATGGGTG | 1249 |
| 800 | CTTCCCGGCAGGACGCAGCA | 1250 |
| 801 | GCCTCTCTTGGACACAAAGC | 1251 |
| 802 | GGTAGCGGCCGGTGCCGTCT | 1252 |
| 803 | AGCTCCGTTTCGTGATGTTT | 1253 |
| 804 | CGGCAACGGTGTAGCGGCGG | 1254 |
| 805 | CTCTGGCAACCGCTGCCTGA | 1255 |
| 806 | CATTCGCACAGATGAGTACA | 1256 |
| 807 | AGCGGCGCCTCAAGCAGCAG | 1257 |
| 808 | ACCTCCACTGGGCCGACACT | 1258 |
| 809 | CAATCAATCACTTCAGAGAA | 1259 |
| 810 | GGCCGACCCGCTGGAGGCGC | 1260 |
| 811 | GAGCCCGACCCACATCAAGG | 1261 |
| 812 | ATTCGCACAGATGAGTACAT | 1262 |
| 813 | CTGCTCTCCGCCGCCTGCTG | 1263 |
| 814 | ATGCCGGAGTTCAGTTTGTT | 1264 |
| 815 | CCACCGCCTGCTGGTGACCC | 1265 |
| 816 | CCGGAGCTTCCGGCCCTCTG | 1266 |
| 817 | ACAGTGTTCCTAAAAGGCAC | 1267 |
| 818 | ACAACCCGGAGCGCTATGGC | 1268 |
| 819 | CACAACTCTGGGGGAAACCA | 1269 |
| 820 | AGCCGATTGAGACTAGTGAG | 1270 |
| 821 | CGGCACCCGTACCTCCGGGG | 1271 |
| 822 | GCAGAAGAACACCCTGGCGG | 1272 |
| 823 | AAACCGCCCGGGGCAGGTGC | 1273 |
| 824 | GCGCTCGGCCGCGCGCCTTG | 1274 |
| 825 | CAGTGCCCGGCCATGGGCTG | 1275 |
| 826 | CTCGGCAAAGAACGCTGGGA | 1276 |
| 827 | CCTCGATGAAGCACTCGTTG | 1277 |
| 828 | TAACAGCGGGTCAGGCACCG | 1278 |
| 829 | GTTTTCTACCTTCTTTTCCC | 1279 |
| 830 | CCGCCATCCGCGCGAGTACC | 1280 |
| 831 | GTCGAGCTGCAAGGGGATAG | 1281 |
| 832 | CGGAGCTTCCGGCCCTCTGG | 1282 |
| 833 | GAGTCTGGGCTCTGCAAACA | 1283 |
| 834 | TCCATAGCGGCAGACATTAA | 1284 |
| 835 | GGGCCTGATGGAGCCACCCC | 1285 |
| 836 | TTTCTGAGCAGTGGCTCCGA | 1286 |
| 837 | GCGGAGGCCCCGGAGAGGTG | 1287 |
| 838 | TGTTGTTGTCGAGCTGCAAG | 1288 |
| 839 | CCGGTACACGGGCGAGGGCA | 1289 |
| 840 | GACTACAACCCGGAGCGCTA | 1290 |
| 841 | TTCCCGCTGGGCTACTCGGA | 1291 |
| 842 | ATACGGGAAAAAGGCGTGGT | 1292 |
| 843 | GCAGGGCGTCACGGTCGGTA | 1293 |
| 844 | GAAGCTCCGCCACACTGTGA | 1294 |
| 845 | AAGGCCGCCCGGGGTAAGGT | 1295 |
| 846 | CCACACGGCTGAGACGTTCC | 1296 |
| 847 | GCACAGGGCATGGGTGAGGG | 1297 |
| 848 | TGCCTCTCTTGGACACAAAG | 1298 |
| 849 | GAGCCGGACACTGAAACCTT | 1299 |
| 850 | CCGTTGCAATCCCTTAAGCA | 1300 |
| 851 | CCTCGGGCGCACCCACGAGA | 1301 |
| 852 | CCCGGACTTCGAGAACGAGA | 1302 |
| 853 | CCACCCGAGGCAGGGGCGGC | 1303 |
| 854 | CCGGAGGTAGGACCCGGCGG | 1304 |
| 855 | AGCTACTGGGTAAGGGGGAC | 1305 |
| 856 | AAGAAAACCTACGCCATGGG | 1306 |
| 857 | CGACAGGGTACTTCAGGGTC | 1307 |
| 858 | CCTCTGTCAGGGAGCCCTCC | 1308 |
| 859 | CTCTACCCGGACCCTGCATA | 1309 |
| 860 | GGCTCACGATGAGTGCCTGG | 1310 |
| 861 | AACCCGCTGCTCACCACCGG | 1311 |
| 862 | TCAAACGTGCAGATGCCAAT | 1312 |
| 863 | GAAGCCGCCGAAGTCCCTGT | 1313 |
| 864 | GTCCAGTCAAAGGAGCAAAG | 1314 |
| 865 | CAAGCGCTCCTTCTTCGATG | 1315 |
| 866 | GGCCGCCGCCCAACGCCATC | 1316 |
| 867 | GGCATGCATCCGCTCATCAC | 1317 |
| 868 | TGCGGCATTTGTCCTGCTCC | 1318 |
| 869 | CTGATCTCAGGTACAGTTTC | 1319 |
| 870 | ACGTCCAGTCAAAGGAGCAA | 1320 |
| 871 | GTTGCCGGCGCGCCTCGCAG | 1321 |
| 872 | GCTCCGGAGGTAGGACCCGG | 1322 |
| 873 | CTCCGGAGGTAGGACCCGGC | 1323 |
| 874 | TCCGGGGGCCCGCCCAGATC | 1324 |
| 875 | GAGTAGGCCTTGCCAAAGCC | 1325 |
| 876 | GCGCGGCACCCGTACCTCCG | 1326 |
| 877 | CGATAGGCAGCCTGCACTGG | 1327 |
| 878 | GTGGGCCGTGCTGTGGGAGT | 1328 |
| 879 | CCGCTAGACACGGACGCGGC | 1329 |
| 880 | ATGGAGGTGACTGGGCCTAC | 1330 |
| 881 | GCGCCATTGGGCCGTGGTCC | 1331 |
| 882 | TGACCACCTGGCTTCCTACT | 1332 |
| 883 | ATAGATCCATCTGGTCCTGC | 1333 |
| 884 | TTCACTCTCTTAACATTCAG | 1334 |
| 885 | CTGCGACAACAACGGTTTTC | 1335 |
| 886 | CACCTACTCCACGAAGCGCC | 1336 |
| 887 | GGGGCAAAGGCTGTGCTCAA | 1337 |
| 888 | GCCGGACTCACCAGGACCAG | 1338 |
| 889 | CGCTGTCAGGTGCAAGCTCT | 1339 |
| 890 | GACCTATCCTAAGGTACGTG | 1340 |
| 891 | GAGTTCAAGTCCCCACCACA | 1341 |
| 892 | CTACAGGCGGCAGGCGCCCG | 1342 |
| 893 | CTGGCTAGATATGAGAAGCA | 1343 |
| 894 | GTGTCAGGGGCGGCCCACGA | 1344 |
| 895 | TGTAGCTACTGCTGCTGCTG | 1345 |
| 896 | CCTGTTTCATCTTGCTGGCA | 1346 |
| 897 | CTTGAGATTGCTGGGATCAC | 1347 |
| 898 | GCACCTACGTCTCCTGGTCG | 1348 |
| 899 | AAGGGATCCGCCTGGTCCTC | 1349 |
| 900 | GCACATATCCCAACAGCTCA | 1350 |
| 901 | AGATGCTGAGCCCGAAGCAG | 1351 |
| 902 | GACAGCTCCCACGCCTACAT | 1352 |
| 903 | ACCAGCCCCCCTGGGCCTCC | 1353 |
| 904 | TGTTGCTACTGCTGCTGGGC | 1354 |
| 905 | TCACGACTGGGATGAACCAC | 1355 |
| 906 | CGGCGCCCTATAGCTGCGCG | 1356 |
| 907 | CCTGCCAAGTGAGGTCCAGC | 1357 |
| 908 | ACTGATGCTCCTGGCAGCCC | 1358 |
| 909 | AGACTTCGGGCCAGGCTTGA | 1359 |
| 910 | CCTGAGGCGCCCCACGATGG | 1360 |
| 911 | GAAGCTGAGCGACGAGGGCA | 1361 |
| 912 | CTGAGATCTGGTTTGCAACT | 1362 |
| 913 | TGTGCAAAAGGGCCAGGCAG | 1363 |
| 914 | ACTCAGGGGTCGGCAGGCAG | 1364 |
| 915 | GTCGCTAGGCAAAGTGGTCA | 1365 |
| 916 | CTCCCATTCTCCCGCCATGT | 1366 |
| 917 | GTCTCAGTGCAGGATGAGGT | 1367 |
| 918 | CTACAAGCTGCCAGACGGGC | 1368 |
| 919 | TGGCCCAGCGGTTCAGCCAC | 1369 |
| 920 | CTTCTATCCAGGGGCGATGA | 1370 |
| 921 | CAATTAATCCCAAGGAACGA | 1371 |
| 922 | TTAGTTCAGCCACCTTCTAG | 1372 |
| 923 | GCTGCCCACCTGGCTGTGGA | 1373 |
| 924 | CCACACCCGGCCAATGTTGT | 1374 |
| 925 | CCTTCACAGCTCCTGAAAGG | 1375 |
| 926 | TCTTTCAGGCAGCCTCTTTG | 1376 |
| 927 | TTTGATCTCCCTGGTCCTGC | 1377 |
| 928 | TCTTCATCCAGTGCTGGTCC | 1378 |
| 929 | GCGGGAACTCTCGGGGCAGA | 1379 |
| 930 | GGTCTACGTTCAGCTGGCCC | 1380 |
| 931 | CCCTAGTCCTCCAGGCTTCC | 1381 |
| 932 | AGAGCTAGGGGGGCGGTGGC | 1382 |
| 933 | CCAGCTACCCCAGCTACTGG | 1383 |
| 934 | CCCGTCCTACTGGGGCATCA | 1384 |
| 935 | TCAGGGACTCTGTGGGGATG | 1385 |
| 936 | CCGGGACTTTCCAGGGCCCC | 1386 |
| 937 | GGATGAGCCCCCAGGTCCTG | 1387 |
| 938 | CGAGTAGGGGAGCCACCAGT | 1388 |
| 939 | CTATTGGGACCCAGCCAAAC | 1389 |
| 940 | GAGTCAGTCATCGCTAGGGA | 1390 |
| 941 | TCCCCAGAAACTGGAATCTG | 1391 |
| 942 | CATGTATCTCGACATCCACG | 1392 |
| 943 | CGCTGACTTTGTCTTCTACT | 1393 |
| 944 | ACGTGATCCCCCTGGACCCC | 1394 |
| 945 | CGCCATATACGTGGCCATCC | 1395 |
| 946 | TGGGGACCATGAGGTGGGGC | 1396 |
| 947 | GGAGCCCCAAGGCCCGCTGG | 1397 |
| 948 | TCTCTGAGGAACAAGACTCA | 1398 |
| 949 | GCTGTAGCCCCTGCCGCTCT | 1399 |
| 950 | CCCAGTGAAGAAGGCAAAAG | 1400 |
| 951 | AGCTATGTGATGAAGCAGGC | 1401 |
| 952 | TCTGACCCTCCTGGTCCCCC | 1402 |
| 953 | CACATCCTATCCCACCAGTT | 1403 |
| 954 | ACCATCCCCGGCCGCCTGCA | 1404 |
| 955 | CATCACACCCATCTTTGCCT | 1405 |
| 956 | AATCAGTGGGCCATGGTGAC | 1406 |
| 957 | CTTTGCATCCACACAGAGTC | 1407 |
| 958 | ACTAGCCCTCCAGGACCTGC | 1408 |
| 959 | TGCTGACCAACCAGGAGAGA | 1409 |
| 960 | AGCGATTCTCCAGGCAAGGA | 1410 |
| 961 | AATCAGGCTTCCCTGGCTTG | 1411 |
| 962 | CCTACCGCAGCCTGTTATAA | 1412 |
| 963 | CCACCAGCCCTCCCTGTGGT | 1413 |
| 964 | CTCATGGCTGAAGCTGTGTT | 1414 |
| 965 | TGCGGAGTCTCTCGGCCCCC | 1415 |
| 966 | CCACACCGGGGAGGTGGGCT | 1416 |
| 967 | ACAGTACAGCTCACTCAGTG | 1417 |
| 968 | CAGGTCAGGCCAGCTGGGGC | 1418 |
| 969 | GAGCAAGCCATGGCACATTG | 1419 |
| 970 | AGGCCTGGACTGTAGAGACA | 1420 |
| 971 | CTTGGGTCAGGCTGATTCAG | 1421 |
| 972 | TTCTCCCCAGTGGGGTCTGG | 1422 |
| 973 | CATTTAATCAGGGTCTTGAA | 1423 |
| 974 | CGGGCACAGTGCGGATGCGT | 1424 |
| 975 | CCTGACCCCAAGGGAGACCC | 1425 |
| 976 | CCTGAAGTGTCTGGACCAAA | 1426 |
| 977 | TTGGCTAGCAGCTGCTGCAG | 1427 |
| 978 | GCCTGAGGCCGTGGAGACAG | 1428 |
| 979 | TGGGTCATCGTCTTTGAAAA | 1429 |
| 980 | AGATCAGTTGTACCAGATGC | 1430 |
| 981 | GTTGAGAGGCTATGTGTGAC | 1431 |
| 982 | CTCACAGGTCCCAAAACGGT | 1432 |
| 983 | GATGTTCTAGGAAGCTCGGC | 1433 |
| 984 | GGACCTAGGCGAGGCAGTAG | 1434 |
| 985 | ACACAGAGTGCTGAGCGGTG | 1435 |
| 986 | CCCTCACTGGCGGCTTTTCC | 1436 |
| 987 | CCAGATTTGAAAGGAAAACG | 1437 |
| 988 | GCTGAGCCCCAAGGTCCTCC | 1438 |
| 989 | GTCGGAGGCCCCTGGCAAGG | 1439 |
| 990 | ACAGGACCCCGCTGGCCAGG | 1440 |
| 991 | TTGTCATGAAGATGCACAAT | 1441 |
| 992 | TCATCAAGAAGGTGCCTCTT | 1442 |
| 993 | CCTAGGAGAAAGGGCTTGGA | 1443 |
| 994 | GCTAGCGGTGATAGTCAGCC | 1444 |
| 995 | GAGAGCTGATAGAAGACTCT | 1445 |
| 996 | CCTCAACTGCCAGACTGCAG | 1446 |
| 997 | TGCTAGGTGACCTTGGCCTC | 1447 |
| 998 | CGAGTCTAGCCATCCGCTGT | 1448 |
| 999 | CCCAGCATCGGCTCCGTCTC | 1449 |
| 1000 | GGGGACGCAGGCCTGGAGAA | 1450 |
| 1001 | TCGCTAGCGGCTTTTCCTGG | 1451 |
| 1002 | CCTGGCAGCCTATGAGTCCT | 1452 |
| 1003 | ACCTCAGGCACGGCAGTGGA | 1453 |
| 1004 | TCCTGTAGGAGTTTGCCAGC | 1454 |
| 1005 | TAAAGGGCATGCTCATCTCC | 1455 |
| 1006 | GAAGAGATCGCCTGGTGCCC | 1456 |
| 1007 | AAAGACCTCCGAGGAATCCC | 1457 |
| 1008 | GCTGCATGTCTCTGCGTCCA | 1458 |
| 1009 | CACTATCTTGCCCCAGGCTC | 1459 |
| 1010 | TACCTTAACAAGCTCCCGTG | 1460 |
| 1011 | CGTGCAGGAAAGAGCAGTGG | 1461 |
| 1012 | TCTAGCTGAGATCCGGGAGA | 1462 |
| 1013 | CATCAGGGACGCCCAGGCTA | 1463 |
| 1014 | CCCTTCGAGCTGGTAGCGCC | 1464 |
| 1015 | AGGCAGAAACCAGTGCAAGC | 1465 |
| 1016 | TACCACCTGCTGGAGGGGTC | 1466 |
| 1017 | TCAGGTCATTCCATGGGGGA | 1467 |
| 1018 | CCGGATGATATGGGAAAGAA | 1468 |
| 1019 | CATCAAGTGGCATATCTATC | 1469 |
| 1020 | GCTGAAGAAAAAGGCAACAA | 1470 |
| 1021 | CCCAGTTCTTCTGCACATAT | 1471 |
| 1022 | GCACCAAGAACACGCCCCAG | 1472 |
| 1023 | ATTTTAAGGGTCAGGGTTTG | 1473 |
| 1024 | GAATAAGATCGAGGACTTGA | 1474 |
| 1025 | GCTCAGAATGGCTGGGTCTC | 1475 |
| 1026 | GGTCAAGGGACCGGAATTTG | 1476 |
| 1027 | CAAGGACAGCTACTGGACGC | 1477 |
| 1028 | CCACGCCAGGGAGGTGGGCT | 1478 |
| 1029 | GTGCCAGCTACAGGGAAGGA | 1479 |
| 1030 | ACCAGACATGCCAGGTCCTA | 1480 |
| 1031 | GCCAATCCTATTCAGGGCCA | 1481 |
| 1032 | AATTCAGTGAATGTAGTATT | 1482 |
| 1033 | TGCTCAGTACATGGTGCTGA | 1483 |
| 1034 | TGCACTCAAGTCTGCACATC | 1484 |
| 1035 | CCTGGGAGCATTGGAGATTT | 1485 |
| 1036 | CAGAGGTCTCCAGGTTTGCC | 1486 |
| 1037 | ATGTTGCTATTGCTGCTGTT | 1487 |
| 1038 | ACTCAAGGTACTGGCGCTGG | 1488 |
| 1039 | GCCCAATGTTATCGAGATGA | 1489 |
| 1040 | AATTACTTTTGCCTAGTGCT | 1490 |
| 1041 | CGAGCAACTCCGCATCCCTG | 1491 |
| 1042 | GAAATAGCTGAGCATCAATG | 1492 |
| 1043 | CACCGACCCGCAGGAGACTG | 1493 |
| 1044 | CAAGACCAACAGGCCTTTCC | 1494 |
| 1045 | ACCTACTCCCCCAGGAACTC | 1495 |
| 1046 | TGACTACAGCTTGTACCCCC | 1496 |
| 1047 | CCCCGCCAAGTTCACCCCTG | 1497 |
| 1048 | GTTCTAGAACATTAACCCGA | 1498 |
| 1049 | ATGATGTCCCTGCAGCTGCG | 1499 |
| 1050 | ATCAGCTGGAGTTGTTGTTC | 1500 |
| 1051 | CCAGATCCTCCTGGGCCATC | 1501 |
| 1052 | CCCAGGCTCCCAGGCAGGGC | 1502 |
| 1053 | CCTCATCCCAGGCAAAAATG | 1503 |
| 1054 | GAAGGCCGACCGGTCGGCGA | 1504 |
| 1055 | CCCTACAGGGCCCCAGGCCC | 1505 |
| 1056 | CTCCCAGGTCATCTCTGCCA | 1506 |
| 1057 | ACGTGCAGCGGAAGGCTGAT | 1507 |
| 1058 | GTTCCCACGCATACACGTCT | 1508 |
| 1059 | CCTTAGTCTGGCCAGTTCTT | 1509 |
| 1060 | CTTCTAGAGGGTGCTGTTCA | 1510 |
| 1061 | GAGCCGGACAACCCGGGCAA | 1511 |
| 1062 | CCCGCCACGCCAGGAATGTC | 1512 |
| 1063 | CCTCAGGTGGCCCAACGGCC | 1513 |
| 1064 | ACCACCTAGGCCAGCTTGAA | 1514 |
| 1065 | TTGTGATGGCCACAACCATG | 1515 |
| 1066 | CGTGGATCACGCCTGGGGGC | 1516 |
| 1067 | GCTAGCTCCAAAGGAGAGAG | 1517 |
| 1068 | GGTTCCCCAGATGATTCTGG | 1518 |
| 1069 | GCTACTGCAACACAGCCACC | 1519 |
| 1070 | GGACTACATCTGTGGCTGGA | 1520 |
| 1071 | CCAAGTCCTCAGGGTCTTCT | 1521 |
| 1072 | GTTGTAGCGGAGAAGGGCAG | 1522 |
| 1073 | GCAGCACCTGCACATGCTGG | 1523 |
| 1074 | CTGAGGCTGCCCCTGGACGC | 1524 |
| 1075 | CTCTTAGTGGCTCTGCTGAT | 1525 |
| 1076 | AATGATGCTCAGGGACCTCC | 1526 |
| 1077 | GAATGATGAAACTGGACCTC | 1527 |
| 1078 | GCCGCTAGACAATGGGAGTG | 1528 |
| 1079 | AGACCTCTAGAAGTCCTTGA | 1529 |
| 1080 | CCTTTAGAGTAGCTGCCTGA | 1530 |
| 1081 | GCGGCTACACCTGTCATGGG | 1531 |
| 1082 | ACTGCTACCCATATATCCAG | 1532 |
| 1083 | CCTCAAGGACCGGCAGGCCC | 1533 |
| 1084 | GTTCGAGGAGCTGGTGGCAG | 1534 |
| 1085 | GCCTCAGCTCTGCCCTCAAC | 1535 |
| 1086 | GGCCTGTAGGGTTTCATTAA | 1536 |
| 1087 | GTTCCTGCAGTTGTTCTCCA | 1537 |
| 1088 | AAGCACATGAGGCATTCTGG | 1538 |
| 1089 | GGGCTAAGTGGGGTACACGC | 1539 |
| 1090 | CAAAATACTTAGGAGAAAAA | 1540 |
| 1091 | GTCATCTAAGACCCACTCAC | 1541 |
| 1092 | GAGGGCTAAGCCAGCAGGTG | 1542 |
| 1093 | AGATACCCCTCCATCCGGAG | 1543 |
| 1094 | CCGCCTCCACGTCGCCTCCA | 1544 |
| 1095 | CAACTCACTTCAGCTCCTCA | 1545 |
| 1096 | TCTATGTCCCCCGAAGGACA | 1546 |
| 1097 | CCGTCATGTGGGTCCTGAAT | 1547 |
| 1098 | TTTCTACTTCTGGAACAGCT | 1548 |
| 1099 | TCCTGCAGCCCAGGCAGGCC | 1549 |
| 1100 | CGTAGTGAAAATGGCTCTCC | 1550 |
| 1101 | AATATGCCAATGCAAGTCCC | 1551 |
| 1102 | CTCCCCTCAAGGATCACGTT | 1552 |
| 1103 | TGCAGCCCACACCTGCCGCC | 1553 |
| 1104 | AACAGTGTTGTTGGTCCCAC | 1554 |
| 1105 | GATCTACAGGCTCAGGCACC | 1555 |
| 1106 | GTGGCAGCCAGCAATAGGCA | 1556 |
| 1107 | GGCCTACTTTGGAGGTGATG | 1557 |
| 1108 | GATCAGGGGTGTCCTCGGGG | 1558 |
| 1109 | CCATAGTTTGGACTGGATAT | 1559 |
| 1110 | GCAACATCTGCACTCTCGTG | 1560 |
| 1111 | AGCAGACTGGATGGGAAACC | 1561 |
| 1112 | GAACATCCTGGGGACGACTC | 1562 |
| 1113 | CTTCTCACCTGCTGGATGGA | 1563 |
| 1114 | GGGTTAGAATGACCCAGATA | 1564 |
| 1115 | CCCTGATCCCGAAGGAGGAA | 1565 |
| 1116 | GCGCTACCTCGAGGCCTTGG | 1566 |
| 1117 | CGTGATGAGGTCGGTCCTGC | 1567 |
| 1118 | TGCGGCAGGACACTTGTGCC | 1568 |
| 1119 | TGCACGAGCTCCTCCGGCCC | 1569 |
| 1120 | GTCAGTGTACCAGGATGCAG | 1570 |
| 1121 | TCACTGGGCGACGGGCCCCT | 1571 |
| 1122 | TCCAGGCGGCAAGAGAGAAG | 1572 |
| 1123 | GCTTTAAGGCTTGCCCAAGG | 1573 |
| 1124 | GAGTCCTACTTGGCCAGGCC | 1574 |
| 1125 | AGTAGCCCTGCTGGAGTCCG | 1575 |
| 1126 | CCCAGTCCTGCTGGTTCCCG | 1576 |
| 1127 | CCAAGGCCCCCTGGCCATCC | 1577 |
| 1128 | TGCTTAGGGTCCAGCCATTC | 1578 |
| 1129 | TTTCAACATGGCCCATGGGC | 1579 |
| 1130 | CTGCACTGGGGAAGGCCCGG | 1580 |
| 1131 | AGTCTCACTCCCCCTCCTGC | 1581 |
| 1132 | GGTCAGGCCAGTGCCCATGG | 1582 |
| 1133 | TATGATGGTGGTTTTCAAAC | 1583 |
| 1134 | GCCTCAGCACACAAAGTGGT | 1584 |
| 1135 | AGGTCCACGCCCGTCAGCTG | 1585 |
| 1136 | CAGGGCATGATGGTGGGCAT | 1586 |
| 1137 | ATGTGTGTGAATCCTGGAGG | 1587 |
| 1138 | CCGCTAGCCCACATGCACAG | 1588 |
| 1139 | CCAGACCCTCCCGGTCCCCC | 1589 |
| 1140 | TCCTACAGCGCCACACCGCT | 1590 |
| 1141 | GAACTATTCATACTGGAAGC | 1591 |
| 1142 | CTTACCGGACGTCAGTGATC | 1592 |
| 1143 | CCTAGAGCTCCTGGCGAGAG | 1593 |
| 1144 | GCTGACCCTCCAGGCTTCCC | 1594 |
| 1145 | CCCTACTGTCCCACATGGGC | 1595 |
| 1146 | CAGGCAAGCCTGGCTGCTGG | 1596 |
| 1147 | CTCTTAGCCGTGCGTCAGGA | 1597 |
| 1148 | TGGCCATGAGGAACACCACG | 1598 |
| 1149 | GTCAGCCTCGCTTGACCCTC | 1599 |
| 1150 | GGAGTCCTACAGGCCTGGGC | 1600 |
| 1151 | CCAGATCCCAGCGGTTCTCC | 1601 |
| 1152 | TCTAGTCAGGAGGATGGCAA | 1602 |
| 1153 | TTCCCTGAGCTGTACAAACA | 1603 |
| 1154 | CCCAGCTGCTGTGGGTCAGA | 1604 |
| 1155 | AAATTCTACTGGCTTGTATT | 1605 |
| 1156 | GGGGTCAGGGGACAGCCTTG | 1606 |
| 1157 | CGGAGAGAGAAAGGAGAACG | 1607 |
| 1158 | TGTGGAGGCTGCAGCTACAC | 1608 |
| 1159 | GTCTCATGCCTGCTCGTGGC | 1609 |
| 1160 | ACAGCTCTAAGAGTGAAGAC | 1610 |
| 1161 | GGTATATGGCAGCTTTGGCC | 1611 |
| 1162 | AGAATTAGATCTGGATCATT | 1612 |
| 1163 | GTGGTTAAGGGGACAGCTGC | 1613 |
| 1164 | AAAAGGGCTCCAGGACCCAA | 1614 |
| 1165 | ATTAGTCCACCATGTTCTTC | 1615 |
| 1166 | GAACTAGCCATCAATACTGT | 1616 |
| 1167 | CACAGACTGCCAGGCTATCT | 1617 |
| 1168 | CACCTACAAGTCCCTGCCCA | 1618 |
| 1169 | TGGCCCACATGTTCTACCAC | 1619 |
| 1170 | GGACTCAGTTGGCAAATCGG | 1620 |
| 1171 | GGCTCTACAGTGGGCCGGTG | 1621 |
| 1172 | GGGCTGATTTGCCATCCGAG | 1622 |
| 1173 | GGAGTAGGAGTACAGAGACG | 1623 |
| 1174 | GGTGCAGGGCGGGGTGGAGG | 1624 |
| 1175 | CAAGCAGAACCGGCCACCCC | 1625 |
| 1176 | CCTGATGCCCCTGGCGCTCC | 1626 |
| 1177 | GCTGGAGGCTTAGGCTTCCC | 1627 |
| 1178 | CCTGAAGAAAGAGGAGGTCT | 1628 |
| 1179 | GTGGACTGTGCTGTGGGAGT | 1629 |
| 1180 | ACATTTCATCCATCCTCTCC | 1630 |
| 1181 | TGTTCACTCAGCAGCATTTG | 1631 |
| 1182 | TGACTTGCACAGGTAGGGGG | 1632 |
| 1183 | AGGGGTAAAGGGTCAAAGCG | 1633 |
| 1184 | CTCCTAAGAAGGGGACATTG | 1634 |
| 1185 | GCACCATGGGCGTCTTCACA | 1635 |
| 1186 | TCCTGATGGTAAAGGCGAAA | 1636 |
| 1187 | ATGTTGTGCATGGTCACTGG | 1637 |
| 1188 | TGTTCCAAAAGTCTGAGTTG | 1638 |
| 1189 | CCATGAGGGAACCAGGTGAG | 1639 |
| 1190 | CACGTGAATGAAGCATACGA | 1640 |
| 1191 | GCAACAAGTTGGGTGGCTGG | 1641 |
| 1192 | CCAAGCCTCTCCGGCCCCGT | 1642 |
| 1193 | CCTGATCTCAGAGGTGAAAT | 1643 |
| 1194 | GTCTTAGTCCCACTGGAAGA | 1644 |
| 1195 | CCTCAGGGACCAGCAGGACC | 1645 |
| 1196 | TTCAGTCTCGTGTATCTTCT | 1646 |
| 1197 | ACTATGTGCAGTGGAAGACT | 1647 |
| 1198 | GCCAGCCCTACTTGTTCTCG | 1648 |
| 1199 | GTGAGTTCTGCTGCATCACC | 1649 |
| 1200 | ATCACAAGCCCCAATGGCTG | 1650 |
| 1201 | TCCCCTCCATGTCTGGGTAC | 1651 |
| 1202 | TCTGCAGGATGCCGTTGTCC | 1652 |
| 1203 | GATGACAGAGGAGCTGAAGA | 1653 |
| 1204 | CCAGATGGTGGATGTGGAAC | 1654 |
| 1205 | CCATGCCTAGTACCAGGCTA | 1655 |
| 1206 | GTGGTGAATGGACATGATGA | 1656 |
| 1207 | GCTGAAAGTCGTGGTGATGG | 1657 |
| 1208 | GCAGCTATGTCCACACCTGG | 1658 |
| 1209 | GTAGCGGCAGTGGAACTCAC | 1659 |
| 1210 | CCTAGTCCTGCAGTCAAAAG | 1660 |
| 1211 | TCATCATGGCGGGCCTTCGA | 1661 |
| 1212 | GAGTATGGGGTATGCCGTTG | 1662 |
| 1213 | AGGGTTATCCCTTGGCATAG | 1663 |
| 1214 | GCTAGTTCAACTTCTCCATG | 1664 |
| 1215 | CCCTAGATCCCCTGGTGCTA | 1665 |
| 1216 | ACAGCATCCGGCCATGGCCC | 1666 |
| 1217 | AGCAGCAGCCTTTGCCCCCG | 1667 |
| 1218 | CCTGATTTACCTGGCACTCC | 1668 |
| 1219 | ACGCGATCATCCCTTCTTTC | 1669 |
| 1220 | CCAGGCAGATATCTGTCAGA | 1670 |
| 1221 | CCCCTAGGGGCCGGGAGCAC | 1671 |
| 1222 | GGGCCACCAGGTCCCGAGGG | 1672 |
| 1223 | GGGGCTAGGGTTGGACAAGC | 1673 |
| 1224 | GCGCTACCGTAACGGCACAT | 1674 |
| 1225 | GTGGCAATCATTTCCCTAAA | 1675 |
| 1226 | TGCTGTCACTTCCTTCGAGA | 1676 |
| 1227 | CCTGAGCCATCTGGTCCCCG | 1677 |
| 1228 | AAAGCAGGCCCTCCGCTGGC | 1678 |
| 1229 | CCCTTAGGCCCCAGGCCGAG | 1679 |
| 1230 | CAGGCTACCCTTGGAGGTCG | 1680 |
| 1231 | CTGCTACCACAGCTTCTCCT | 1681 |
| 1232 | CCAGGGACGCCCTGGCTACC | 1682 |
| 1233 | AGCATCCATTATTGCAGATC | 1683 |
| 1234 | AACTGATCCTTATACCTGTT | 1684 |
| 1235 | TGGCTAGCAGTGCAGGGACA | 1685 |
| 1236 | TGTCACTGGGCAAAGTGGTC | 1686 |
| 1237 | CGTGGAGAAAGAGGTAGGCC | 1687 |
| 1238 | AAGCAGCTCCAGGCTTTCCA | 1688 |
| 1239 | CAACTAGAACTCCCGTAATT | 1689 |
| 1240 | AATGACTTACCTGGGAACCC | 1690 |
| 1241 | GCTGAGCCCTGGCGCTGCTT | 1691 |
| 1242 | AGTGGAGCAGCAGCAAGCGT | 1692 |
| 1243 | CTTATGGGTCTGGCAGGCTG | 1693 |
| 1244 | CTCCTAGCTGGAGCTGCACC | 1694 |
| 1245 | CCAGCTTCACCAGGTCTCGA | 1695 |
| 1246 | CTGACCGGGAGGCCGCGCTG | 1696 |
| 1247 | CACTGGCCATAAGATTATTG | 1697 |
| 1248 | CCATTAGTAGGCTCGGCGCT | 1698 |
| 1249 | TTTGTTCCCAGAGCTCTACC | 1699 |
| 1250 | ACAGCGACCAGCTGGGGCAG | 1700 |
| 1251 | CCGCCGCTAGTAGTACCCGC | 1701 |
| 1252 | ATGAGTGTCCGGAGCAGCTG | 1702 |
| 1253 | GCAGGATCAGGTTCACTCCT | 1703 |
| 1254 | GGCCGTGGACGAGTTCGACG | 1704 |
| 1255 | TAGCAGCCGGTGAAGTGGGC | 1705 |
| 1256 | CGGCCTATGTAGTTGAAGCT | 1706 |
| 1257 | CCACATGTCCTGTAAGTACT | 1707 |
| 1258 | CGGACGCCCGGCTGCTCCTG | 1708 |
| 1259 | GGTAGGTTATGGTCTTCAAA | 1709 |
| 1260 | AAGGCCACCTGGGGTAAGGT | 1710 |
| 1261 | GTTAGCCGAACTGGAGAAGT | 1711 |
| 1262 | CTTAGCTGGGGCTGCGGGAG | 1712 |
| 1263 | GGCCCTCATTCACCCTGGGT | 1713 |
| 1264 | GTTCTAGATGTCCACCCGCT | 1714 |
| 1265 | GCCCCAGCCTAAGCAGCGCG | 1715 |
| 1266 | GCCCAGGTTGGAAGAAGCTG | 1716 |
| 1267 | GAGCTATCGCACATCCAGAT | 1717 |
| 1268 | CGTAGAGAACAGGGCCTCCC | 1718 |
| 1269 | TGGCTATCAGTTGCAAAAAA | 1719 |
| 1270 | ATCCCCATGGGGAAAGAGGT | 1720 |
| 1271 | GTGTCAGCCCTTGGTGTCCA | 1721 |
| 1272 | AGAGATGAAATTGGTAACCC | 1722 |
| 1273 | CAGACAGGCAGGCCCATCAG | 1723 |
| 1274 | CCTAGCGCAGCTGGTACCAG | 1724 |
| 1275 | GCCTCAACTCAGCTGCTCAA | 1725 |
| 1276 | CCATGACTGGACGGTAAGGG | 1726 |
| 1277 | GGGTTTACAGGCGTGTTTTA | 1727 |
| 1278 | CATCATGCCTCCATCATTTC | 1728 |
| 1279 | CCGGCTTCCACCGCTTCCGC | 1729 |
| 1280 | CCGTCATGCTGTTGCTGAGC | 1730 |
| 1281 | CTCCATGTCCCAGGTCACGC | 1731 |
| 1282 | TTGGCCTACTCAAAGTTACC | 1732 |
| 1283 | CCTAGTGGTAAAGGAGAAAG | 1733 |
| 1284 | CTGCTACTCGGCGATGCGCT | 1734 |
| 1285 | CCTCAACGCCGTTCGGGCAC | 1735 |
| 1286 | CCGAGACCCCACACACCTGC | 1736 |
| 1287 | ATCATCCCATAAGCCCCACT | 1737 |
| 1288 | CAGTATTTTCATGGATAGGA | 1738 |
| 1289 | TCAGGCCACCCTCATCTGCC | 1739 |
| 1290 | CAGGGCCTAGGAGAAGTCCC | 1740 |
| 1291 | CTCGGGGGACGGGGACAGCG | 1741 |
| 1292 | TCTCTAGGGAACAAGACTCA | 1742 |
| 1293 | GGGGCAATCATCTCCCTCCT | 1743 |
| 1294 | CCACTAGATGCGCTCTTTGA | 1744 |
| 1295 | GATGAATGGCTGCAGGCTGG | 1745 |
| 1296 | GTCGATCCAGCTGGAAAGAG | 1746 |
| 1297 | GGGGATGAGTGTGTTGTTGA | 1747 |
| 1298 | GTTAGAAGAGTGCTTGGACT | 1748 |
| 1299 | ATGGTACGGAGGCCCTGGAG | 1749 |
| 1300 | CGCGTCTAGGATGCTTACAC | 1750 |
| 1301 | CAGCCACTCACTGTTTCTAT | 1751 |
| 1302 | CCCAATGGGCGGTTTGTCAT | 1752 |
| 1303 | CCTCAGGCACCAGGGAAGCC | 1753 |
| 1304 | CCCCTGGCTACGGGGGAATG | 1754 |
| 1305 | GCAATATGTGTGGCCACTTG | 1755 |
| 1306 | ACCTCACTCTCCAGCCTTGC | 1756 |
| 1307 | ACTGACTGGGGAGAAACCCA | 1757 |
| 1308 | AAGTGACTGGCCAACTTCTG | 1758 |
| 1309 | GTTTAGGGGTAAGTCCGGCA | 1759 |
| 1310 | TCCACTTGAAGAAGCCGACC | 1760 |
| 1311 | TTCTCACTTTTCGACAGGAG | 1761 |
| 1312 | CAGGCAGGCAGCCAGGATCA | 1762 |
| 1313 | AGCCCTACGAGGAGGATTCG | 1763 |
| 1314 | GCTACCTCTGGTACCAGTCA | 1764 |
| 1315 | AGCAAGGGTCCCCTACCCAC | 1765 |
| 1316 | TCATAGCTATCACTATGGAG | 1766 |
| 1317 | GCGTAGAGCCGCGATAACCC | 1767 |
| 1318 | CCATCGTGCTGTTGCTGAGC | 1768 |
| 1319 | TCTGGAACTGCTGATGGCTC | 1769 |
| 1320 | ATTTTAAGGTTCAACCCCTT | 1770 |
| 1321 | ACCACCATGTCTGACACCTT | 1771 |
| 1322 | CACTCAGATTCTGTGTCCAA | 1772 |
| 1323 | AATGACCCACAACACTGAGC | 1773 |
| 1324 | TTCTGCACATGGCGGTCACT | 1774 |
| 1325 | CTACTACCAGTGCAAGCTGG | 1775 |
| 1326 | GTAACGACAGACTTCTCCTC | 1776 |
| 1327 | TCGCAGAAAACGGTGCGCAC | 1777 |
| 1328 | CGAGAACGGCCAGGACTTCC | 1778 |
| 1329 | GTATGCTAGCTTTGCGAGTT | 1779 |
| 1330 | CCCAGGCCTTCCGGCCTTGC | 1780 |
| 1331 | CGGTGCAGAAGAGGGACTGG | 1781 |
| 1332 | CAGGAGCAGCACCTGGAAGC | 1782 |
| 1333 | TCATTGATGGTGATGTCCTC | 1783 |
| 1334 | ACAAGACATTCGTGGCGATA | 1784 |
| 1335 | AAAGCACTACACTGAAGACC | 1785 |
| 1336 | GGCCGGCAACGTCTTTAGCT | 1786 |
| 1337 | CAACTAAAAGAGTGCCAGCC | 1787 |
| 1338 | CGCAGGGCATCAACTGGGAG | 1788 |
| 1339 | AATCTCACACACGAAATTGT | 1789 |
| 1340 | CGGTTACAGTCACTGATAGT | 1790 |
| 1341 | GAACTAGTAGATGCCGTTCA | 1791 |
| 1342 | ACCACCACCGTGGACGTCGT | 1792 |
| 1343 | GGCCAGGCTGCTGGGGCTGC | 1793 |
| 1344 | AGGTCCAGCACATCTTCTCC | 1794 |
| 1345 | CCTGAATGGCCAGGCCTGAA | 1795 |
| 1346 | AGGCTGATACTTCTACATTC | 1796 |
| 1347 | CCTAGGAACGATGGTCCCCC | 1797 |
| 1348 | AACGATGCTCCTGGTGAAGC | 1798 |
| 1349 | GAATGACATCAACCTGGCAC | 1799 |
| 1350 | ACAGATGAACGTGGAGCTGC | 1800 |
| 1351 | AGGCAATGTACATAAATCTG | 1801 |
| 1352 | ATGGAGGTAAAAGGGACTAT | 1802 |
| 1353 | CTTATTCGATGAAGCTGGCC | 1803 |
| 1354 | TGCAGCCGCAGATCCCGATC | 1804 |
| 1355 | TCTCTCTAAAATCACTGAGC | 1805 |
| 1356 | GGACTACAATAGATTCCCGC | 1806 |
| 1357 | TCCCAAATCTCCCTAGAACG | 1807 |
| 1358 | TGAGGCTGCGGCAGCCCGCC | 1808 |
| 1359 | TACTTCAACACAGTGCCACA | 1809 |
| 1360 | CCCAGAAGTCCAGGAGGACC | 1810 |
| 1361 | TGTCACCCTGACTGCGGGCC | 1811 |
| 1362 | CCTGATCATCCAGGCCCACC | 1812 |
| 1363 | TCACTGACAGACAGTGGCCC | 1813 |
| 1364 | GCGAGCAGCACGAGTTTGCG | 1814 |
| 1365 | TTCCTACTTGGAGTGATTTC | 1815 |
| 1366 | CCAGTGAAAGCACTATTGAC | 1816 |
| 1367 | CTAGCCAACATTGTTTTGTG | 1817 |
| 1368 | TGGCTCAAACCAGAGGCTTC | 1818 |
| 1369 | GAACAATCTACAAGGGAAAG | 1819 |
| 1370 | GACAGAGGGAGTACTCGGCG | 1820 |
| 1371 | TCCGGAGCAGCATCCACACA | 1821 |
| 1372 | GAAGAGGCAGCTGGTTCCAC | 1822 |
| 1373 | GGACTACAGAGTAGTCCGGC | 1823 |
| 1374 | CCCACTCCTGGATCAAATAA | 1824 |
| 1375 | AAGGACGACAGAGGTTTGCC | 1825 |
| 1376 | TGGCCTGACACGTTCTCATG | 1826 |
| 1377 | TGCTTAAGAGAGGTAGAAGG | 1827 |
| 1378 | GTTTCAATAAGCCCGACGGA | 1828 |
| 1379 | CAAAGGACACAGAGCCAAAT | 1829 |
| 1380 | TGCTCCCAGGCATACACATC | 1830 |
| 1381 | TGACTGATGTAAATACAATG | 1831 |
| 1382 | TGACCTTATATGTTGGTGTG | 1832 |
| 1383 | CTCAGCTGACCGATCGCTTC | 1833 |
| 1384 | GCTGAACCAAATGGCATCCC | 1834 |
| 1385 | TGGTATCCCTTTGGATTTGA | 1835 |
| 1386 | GCATCCACTATCCCAGTAAG | 1836 |
| 1387 | CAAACCACCCACTGGGCTGC | 1837 |
| 1388 | GGTCCCCAGGGCCTCAAGGT | 1838 |
| 1389 | CGCAGGCTGAAGGGCGACCG | 1839 |
| 1390 | AGCCAAGTCAGCGCTGCTCG | 1840 |
| 1391 | TTAGTAATACTTGTGGGCCA | 1841 |
| 1392 | CCTGATGAACCTGGGCAAGC | 1842 |
| 1393 | CACGGACGTGGCGGCCGCCG | 1843 |
| 1394 | AGAACTACTCCACAGGGTTC | 1844 |
| 1395 | GTCCAAGGCTTGCAGCTGCC | 1845 |
| 1396 | AATAATGCCAGAGCATTAGA | 1846 |
| 1397 | CCAGAGGTGAAGGGTCAAAG | 1847 |
| 1398 | TACTGGAGAACGGCAACCAC | 1848 |
| 1399 | GGACACCATTCAGCGGACTG | 1849 |
| 1400 | ACCTAGTGTGGTTGGTGCTG | 1850 |
| 1401 | AGGCCCAAGATGAGCACACA | 1851 |
| 1402 | GGTTCTAGCACATGGAGATG | 1852 |
| 1403 | GGTGGCATGGCTCGGGCCTG | 1853 |
| 1404 | AACCAGATGGACAGCCACAC | 1854 |
| 1405 | CCATCTCAACCTGGGGCTCC | 1855 |
| 1406 | TGGTCTGCTAGATGGACAGC | 1856 |
| 1407 | TGCGTCAGATTCTTTCTAGA | 1857 |
| 1408 | TAGTTCTCACTCAGTGGACA | 1858 |
| 1409 | TCTCAACAGCCTGTGGGAGA | 1859 |
| 1410 | AGCAGCAACGATTGTTGGTG | 1860 |
| 1411 | TTCTTATTGAGGGCTATGCC | 1861 |
| 1412 | AGGGCCAACACAGTGGAGGG | 1862 |
| 1413 | CCCAGGGACCTCGGACCTGT | 1863 |
| 1414 | ACCAACCACCACTTTCTGAT | 1864 |
| 1415 | AAGGGGCAGGTGACAGGCTG | 1865 |
| 1416 | CCCCAAGTTCCTGAGATACC | 1866 |
| 1417 | GAAAGTGGAATCACACTGAG | 1867 |
| 1418 | CCTGAAATTCCAGGACCTCC | 1868 |
| 1419 | GCCTAAGTCCAGGGTTCAGG | 1869 |
| 1420 | GCAAAGGTACCAGCTTAGAC | 1870 |
| 1421 | GCCGATCCTACTGGTCCTAT | 1871 |
| 1422 | CTCAAGTATGGCTATGATGC | 1872 |
| 1423 | GACGCACATCAATGCCACCC | 1873 |
| 1424 | GAGGGAGAACGGGCCACAGC | 1874 |
| 1425 | AGAGATGACCAAGGACGTGA | 1875 |
| 1426 | GCCAGTGCTACTGGTGCCAG | 1876 |
| 1427 | GCTGATCGCCCTGGGGAGCC | 1877 |
| 1428 | TCAGGCAGCCTTGGGCTGCT | 1878 |
| 1429 | GTACTAGAAGATGCAGTCCC | 1879 |
| 1430 | AGCGTTATATATTCTCTGTG | 1880 |
| 1431 | AAAGATGAAAGAGGATTTCC | 1881 |
| 1432 | AAGTCCGAGCAACGGGGCCG | 1882 |
| 1433 | GGACTATGACCAGCATAGAA | 1883 |
| 1434 | GGGCCACTTGTTGGCTGGCT | 1884 |
| 1435 | GGCCCAAGAGAGTCTTGCCC | 1885 |
| 1436 | ACGTGAAACATCTCGTTCGC | 1886 |
| 1437 | AGTCACAGATCTTCACTTCC | 1887 |
| 1438 | AGTCAGAGATGTTCTTGCAC | 1888 |
| 1439 | ACCAAGTGTTGCTGGTGCTG | 1889 |
| 1440 | AAGAGTGAAACAGGTGCTCC | 1890 |
| 1441 | CTGGAGGGGCGGGAGGCCCC | 1891 |
| 1442 | AAGAGAAGAACCTGGACCTC | 1892 |
| 1443 | CCTAGAGAGAAAGGTGTGCC | 1893 |
| 1444 | TTGCAAACAACATGTTGGGA | 1894 |
| 1445 | GGTGGCAAGAAGCAGAGAAT | 1895 |
| 1446 | TGTGCTCCATGGTGATGGCC | 1896 |
| 1447 | ATGTCGCAGGGGGCGGCCCC | 1897 |
| 1448 | AGACAGAGCAGCCGTCGTGC | 1898 |
| 1449 | AAGGAAGACATCGGAGTCCC | 1899 |
| 1450 | AAGAGGCCCAGAGGTCTTCC | 1900 |
| 1451 | CCCAGACGACCTGGAGAGCG | 1901 |
| 1452 | CGCTACTCGCAGAGGCCGCC | 1902 |
| 1453 | CCCAGTGAAAAGGGGCCCAG | 1903 |
| 1454 | ATAGGCAACCTGCACTGGTG | 1904 |
| 1455 | TTTTTAGGTTCACGCTGCTG | 1905 |
| 1456 | GCTACTGGTAGAGCTGGTCA | 1906 |
| 1457 | CGTGCAAGACAGGAAGAGGC | 1907 |
| 1458 | CCCGGAAGCCCACAGCACCA | 1908 |
| 1459 | AGTCAGCCCCAAGGGCCCCA | 1909 |
| 1460 | CGCAGCAACCATGGTGGCAT | 1910 |
| 1461 | TCTGCTAGGAGAAGTAGAGG | 1911 |
| 1462 | GTTATTGGTATTCAGTATTC | 1912 |
| 1463 | CTTCAAAGAGCAAGGTTGCC | 1913 |
| 1464 | GCTCAGATGATGGTGTCTGC | 1914 |
| 1465 | CCGCCACCTGGCGGTTGGCG | 1915 |
| 1466 | CAAGCCCAACAGGCAGAGCC | 1916 |
| 1467 | CCAGAAGCTAACGGTCTCAG | 1917 |
| 1468 | GCAGGGCGACCATGGCTCTC | 1918 |
| 1469 | TGGGAGCCATGAGGTGGGGC | 1919 |
| 1470 | CCCCCATGATGGGGACGACT | 1920 |
| 1471 | GTTGAACCCAGTGGACCTCC | 1921 |
| 1472 | GATGATCGCACTGGACATCC | 1922 |
| 1473 | TCCTGAAGACCCTGGCCTGC | 1923 |
| 1474 | GGGCGGCAGCTACGTGCTCT | 1924 |
| 1475 | ACTCAAGATGACTTTGTGCG | 1925 |
| 1476 | ATGCCAGGTGGCATGTTTCC | 1926 |
| 1477 | AACAGATGCTCCTGGATTAA | 1927 |
| 1478 | GCCCCAGATGTCATCCTCCT | 1928 |
| 1479 | CGATGAACGAAATGGAGAAA | 1929 |
| 1480 | GAAAAGAGATGAAGGGCCTA | 1930 |
| 1481 | CTCACCAGACTACGAGACCG | 1931 |
| 1482 | GAACGACATGAAGTACTACC | 1932 |
| 1483 | GCCAGAACCACCTCCTCCGT | 1933 |
| 1484 | CCTGACCCAATTGGCCCAGC | 1934 |
| 1485 | TGCCATGACTGTGGCCTGCC | 1935 |
| 1486 | CGTAGCGATAAGGGAGAGCC | 1936 |
| 1487 | GTTTTAACAGCTCTCCACCC | 1937 |
| 1488 | AAAGAGGACATTGGCCCTCC | 1938 |
| 1489 | ACCGCAGGGAGGCCGCCAGC | 1939 |
| 1490 | TCAGGAACCTCCTGGACCAC | 1940 |
| 1491 | CCCCAGAGGTGTTCACACAC | 1941 |
| 1492 | GTCCTAGCAGGTGCCCCCGT | 1942 |
| 1493 | CCTCTCCACGGCGCGGCCAT | 1943 |
| 1494 | TCTAGAGAAATGGCCAGCGG | 1944 |
| 1495 | AGAACTATTTGTTTAGTTCT | 1945 |
| 1496 | CGCTCATTTAGGGAAGGAGA | 1946 |
| 1497 | GCGGTCAGCCACCTGGCTGG | 1947 |
| 1498 | TGGTTGATTTGTCAGCAATC | 1948 |
| 1499 | GACGACCAGAATGGCGTGCC | 1949 |
| 1500 | AACTAAGCGAATTTGGATAA | 1950 |
| 1501 | TTCCTCGTGATCGCAGGCTT | 1951 |
| 1502 | AAAGATCATGCTGGTCTTGC | 1952 |
| 1503 | CCTAGACAAAGAGGAGAACC | 1953 |
| 1504 | TCCCTAACAGAGCCCGGGGA | 1954 |
| 1505 | AGAACCACAGAGCTAAGCAA | 1955 |
| 1506 | ACATCAGCAAGCCTTTACTT | 1956 |
| 1507 | CCAGACCAACCCTGCTCTGG | 1957 |
| 1508 | GCAACCAGTTGTACCGCGAG | 1958 |
| 1509 | TAATCACTTGGCCATGTAGT | 1959 |
| 1510 | CTTTCACACACAGTAGTCCC | 1960 |
| 1511 | CGTCCAGGTAGTGCGTCTTC | 1961 |
| 1512 | TCTCATCCTCGGGGGCCAAC | 1962 |
| 1513 | CCTCAAGGGCCTGTCTGACC | 1963 |
| 1514 | CCCAGGTTTCCAGGGAGCAA | 1964 |
| 1515 | TGCAAGCACCTGCAAGAATG | 1965 |
| 1516 | CTAGGCAGGACACATCTCAC | 1966 |
| 1517 | CACACAGAGCTCATTGTAGA | 1967 |
| 1518 | GTGATGAAAAACTCTCCCGC | 1968 |
| 1519 | TCCCCCTGCACATGCGGGAC | 1969 |
| 1520 | TTCACTCCAGGTAGGGCAGA | 1970 |
| 1521 | AAGGATGAAACAGGTGCTCC | 1971 |
| 1522 | AAGGTTTAATAGGCAGCTGA | 1972 |
| 1523 | TCTGATCCTAGTGGACTCCC | 1973 |
| 1524 | TAGAGCTTGAGGTTCACATC | 1974 |
| 1525 | ATACATTTTTACCAAGAAGT | 1975 |
| 1526 | TTGGGAAGGTTCTTACATGA | 1976 |
| 1527 | TATCCACTACAACCCGCTGC | 1977 |
| 1528 | CCCGACCCCCCAGGGCCGCC | 1978 |
| 1529 | GCAGTGCTGAGCAGAGCAGC | 1979 |
| 1530 | CATTCTTAAGTGTGAAGGTC | 1980 |
| 1531 | GTGCCGGAAGACGGGGCTGC | 1981 |
| 1532 | AAGGCAGTAGTTTTTAGTAA | 1982 |
| 1533 | TGAAGTTGTCCAGGTGAGCC | 1983 |
| 1534 | CCGATGATACCAGTTTCGAG | 1984 |
| 1535 | TTACGTATATTCATGGAGTA | 1985 |
| 1536 | CCCAGGTTGCCAGGGGCTCC | 1986 |
| 1537 | CATAGGCATCATGTCCATCC | 1987 |
| 1538 | TGAAAGAGCCACATATAAAG | 1988 |
| 1539 | CTCTTCTACAATATGTAGCT | 1989 |
| 1540 | ATTTTATGCATCTGGTGGAA | 1990 |
| 1541 | GCAGCTGTAGTTTAGTCCTA | 1991 |
| 1542 | ATGAAATCTGGCCAGCTTTG | 1992 |
| 1543 | TTGCAAGCAAAATAGTTCTG | 1993 |
| 1544 | CCATTATGTTGAGATTGGGG | 1994 |
| 1545 | CAGAGAGAGCTGGGGCGGAT | 1995 |
| 1546 | GCAGAACCCCCTGGAGGTTC | 1996 |
| 1547 | GCCTAGCCCTCGGCCATCGC | 1997 |
| 1548 | TGTTGAGTACCAGGGAATGA | 1998 |
| 1549 | GCTGCAGCGCATTGCCAGCC | 1999 |
| 1550 | CATCTCAGTAGACTTTTACC | 2000 |
| 1551 | GGAAGCTAGGAGCTGGGGGA | 2001 |
| 1552 | CGACCTCTACATGGTCTCTC | 2002 |
| 1553 | TTGGCCAAGTGCCTGTGCGG | 2003 |
| 1554 | TCCTAGCACTCCAGGTCCTC | 2004 |
| 1555 | GGGCTAGAGAAGGACCTGGA | 2005 |
| 1556 | GTTGAACGTGAGCCGCTTCT | 2006 |
| 1557 | GCTCAGCAGGGCCTGCAATT | 2007 |
| 1558 | ACCAGAAAGCATGGGGAACA | 2008 |
| 1559 | ACAACAGCATGCCACTGGCC | 2009 |
| 1560 | GTATACTGTTGATGTGTATG | 2010 |
| 1561 | TTAATCACAGCTTTTGGTCC | 2011 |
| 1562 | ACTTTAGTCAGTTTCCTCAT | 2012 |
| 1563 | GTCGCAGTAGGGCGCACGCT | 2013 |
| 1564 | GCAAGGGCCCCAGGACTTAG | 2014 |
| 1565 | CTAGGGGGCCATGGATGCTA | 2015 |
| 1566 | CCCAGAGAAAGATGGCCCAA | 2016 |
| 1567 | CAGAGTCTTCCTGGTCTGGC | 2017 |
| 1568 | CACATGATACGACCTGCAGA | 2018 |
| 1569 | GGGCTAGAAGAAGCAGTGCA | 2019 |
| 1570 | GCGGACACGGTACCTGGGCT | 2020 |
| 1571 | CCAGAACCTCCTGGTGCTAT | 2021 |
| 1572 | TCTGCCAGAAGTCCCCGTAG | 2022 |
| 1573 | CCAGAAGAGAAGGGAGAAGC | 2023 |
| 1574 | TGCTGACATTCGAGGCCCTC | 2024 |
| 1575 | TTCGAGGGTATACATGGGCT | 2025 |
| 1576 | CACCAAGGATCTGATTTAGT | 2026 |
| 1577 | AATCTAGGATATATGTTTCT | 2027 |
| 1578 | AAGAGTGAAAACGGTGTTGT | 2028 |
| 1579 | GCAGGGCATGTCTCTGCAAA | 2029 |
| 1580 | TCTCAGGAGATGAAGTCTTC | 2030 |
| 1581 | TTCTCCTAAGAATGGGAATA | 2031 |
| 1582 | CAGCAAGGCCTGCAGGCTGT | 2032 |
| 1583 | GACTGAGATGGTGATCTCGT | 2033 |
| 1584 | GCCAGTGCTAATGGTGCTCC | 2034 |
| 1585 | ACACTAATTTCCGCCAGGTA | 2035 |
| 1586 | CCACAAAGACAATGTGGTAG | 2036 |
| 1587 | CGACAGGGACCAGTCGGTGG | 2037 |
| 1588 | TAAGATGCAGGCTCTAGAGG | 2038 |
| 1589 | GGAAGTGACGTGCTGTGCTG | 2039 |
| 1590 | AAGCGTTAAATATCGGCATC | 2040 |
| 1591 | AAGCTGCAATCTGAAAACAA | 2041 |
| 1592 | CCCTGGTGAGACACCTCCTC | 2042 |
| 1593 | GTGAATGTAGAGGTCTACAG | 2043 |
| 1594 | TTTCAACGCCCCCGCCACCG | 2044 |
| 1595 | ATACTACATCAGGATTTTGC | 2045 |
| 1596 | TCCTAGCATTCCAGGAAAGG | 2046 |
| 1597 | ACCTTAGCACCTTCTTCCAC | 2047 |
| 1598 | GTCACGGGAAACTGATCCTC | 2048 |
| 1599 | GGCCAACCACAGGTCGGAGG | 2049 |
| 1600 | GCGTTCCAAGGAGGACGGCC | 2050 |
| 1601 | CCACCATGTACTCTGCAGGG | 2051 |
| 1602 | CTCAAGGGTAAAATTCGCTG | 2052 |
| 1603 | ATACTACAGGAGAGAGAAGA | 2053 |
| 1604 | CTAATCCCCTAAGGAAACAG | 2054 |
| 1605 | GTTCAAGAAGAAGTCGCTGG | 2055 |
| 1606 | CGGAGTCTTGCAGGACCACC | 2056 |
| 1607 | GTCCGGTATCTAAAAGACTA | 2057 |
| 1608 | AAACAAAGGTGCTTCAATAA | 2058 |
| 1609 | AGTTCTCAGGCTGTGTAATA | 2059 |
| 1610 | TAATTCATTCTAATTGGTTC | 2060 |
| 1611 | GGAGGGTAAGGAGTGCAGGT | 2061 |
| 1612 | CCTAGGGGCGCTCGGCCGCC | 2062 |
| 1613 | CCCAGGGAGAAGGGGAGCAT | 2063 |
| 1614 | GATAGACAGCCTGCACTGGT | 2064 |
| 1615 | CACAAGCACTTTTTCTGATT | 2065 |
| 1616 | TGTTTCAAGTGCTGGCAGTG | 2066 |
| 1617 | GCCCAAGCCTTGCCGGACGC | 2067 |
| 1618 | ATCTCATTCTGCAGGCAGCA | 2068 |
| 1619 | CGGGAGTAGATGATTAGAAA | 2069 |
| 1620 | TGGTGAGACAGGATGTGGCC | 2070 |
| 1621 | GCTAGTCCAGGGGCAGCACC | 2071 |
| 1622 | CACTCTATTTCTGCTGGCTG | 2072 |
| 1623 | CACCCACCAAATTCCAGCTT | 2073 |
| 1624 | GGAGGAAAAAGATGAACCTT | 2074 |
| 1625 | CAGGAGTCTCCCCTGGGGGA | 2075 |
| 1626 | CCTGACCCAGCTGGCCAGCC | 2076 |
| 1627 | CCGTGGAGCAGAGCTCGCAG | 2077 |
| 1628 | AGGAACAGTTCATTGATAGC | 2078 |
| 1629 | TCTTACAGAATGTAGCCTTT | 2079 |
| 1630 | GTCTCAAACATTGTCCTGAA | 2080 |
| 1631 | ACTAAGGACTGGCAGGCACT | 2081 |
| 1632 | CTTCAGGCTGCCCCGGCTGC | 2082 |
| 1633 | GCCTGACCATCAGGAACATG | 2083 |
| 1634 | TCACACTGACCCAGACCTGG | 2084 |
| 1635 | CAGAAGTGAAAGAGGATCTG | 2085 |
| 1636 | GGCACTGTGACATCGATGAG | 2086 |
| 1637 | CCAGAATTGGATGGCATCCC | 2087 |
| 1638 | GATCGAAAACGCGGCGGCGG | 2088 |
| 1639 | AAACGTCCACGCGGTGCGGG | 2089 |
| 1640 | AGCACACACCTTGTCCAGGT | 2090 |
| 1641 | CCTTAGGGGCTTTGCCCCTG | 2091 |
| 1642 | GAATGAGCTTCTTGCAGCAA | 2092 |
| 1643 | CTGGCAGTAGTAGGGGCTGA | 2093 |
| 1644 | GGAGTCATGAGGTACCTGCA | 2094 |
| 1645 | ATGAGCACGATGTAGCTATA | 2095 |
| 1646 | TTCCACTTCACCGGCACCTG | 2096 |
| 1647 | GGCACACATCGAGGAGCTGG | 2097 |
| 1648 | ACACCAAGCCGGCTGGCTGC | 2098 |
| 1649 | CTCAGGCCACACTGATTCGC | 2099 |
| 1650 | TCTCTAATAAGCAGTACTGT | 2100 |
| 1651 | TGGTTTGAACTGGATATCGG | 2101 |
| 1652 | CCCAGTCAAGATGGTATTCC | 2102 |
| 1653 | TCCACTATACTCTCAAGGAT | 2103 |
| 1654 | AAGTCACAGACGCTTCTTTT | 2104 |
| 1655 | AGCACAGCATCGTCACCAAC | 2105 |
| 1656 | ATGTGAAGATTGCCACCTAC | 2106 |
| 1657 | TGCATGAGCCGCTCTAGCAT | 2107 |
| 1658 | GAAACAGGGTTTCACCATGT | 2108 |
| 1659 | GAAGAAAAGAGAGGCCCTAA | 2109 |
| 1660 | TAGTGCAGCAAAAGCGCGCC | 2110 |
| 1661 | CAAAGAAGAGTGCGGCAGCG | 2111 |
| 1662 | AGAAACATAGGCACATCCAC | 2112 |
| 1663 | TCTCGCCCAACCCCAACCTC | 2113 |
| 1664 | TTTGATTGGTCCTGTTGGCT | 2114 |
| 1665 | TTCTCATGTGGAATTTTCCA | 2115 |
| 1666 | CCTCCAGGAGGGGTAGGGGT | 2116 |
| 1667 | GAGTACCAGAAGAGATACAG | 2117 |
| 1668 | CGATGAGGTACTTCAGGGTG | 2118 |
| 1669 | ATTGAACCACCAGGGCCTCG | 2119 |
| 1670 | CGAGTAGCAAGAGGTGGAGA | 2120 |
| 1671 | CTGAGTCAGCATCTGCCAGC | 2121 |
| 1672 | TCCAGATAGGTGTGCTTTGT | 2122 |
| 1673 | TGATGACACCAAGGGAGAAA | 2123 |
| 1674 | AGCACTGACGTCTGGGGGAG | 2124 |
| 1675 | CTGAGATTGAGAAACCTGGG | 2125 |
| 1676 | AAGCTTTCAACATCTGTGAA | 2126 |
| 1677 | GGAGCAAGGTCCTGCTCCGA | 2127 |
| 1678 | CTATCTTTTCCTCTAGAGTC | 2128 |
| 1679 | AAGTCATTGCTGTATGAGCC | 2129 |
| 1680 | AGTCCAGCTAAAGCCCTGGC | 2130 |
| 1681 | CCCAAGTTTTCCTGGCCTCC | 2131 |
| 1682 | CATGACCATCCAGAACGCCC | 2132 |
| 1683 | CCTAGAGAACAAGGACCCCC | 2133 |
| 1684 | TTTGGGTCAACTGTCCACCT | 2134 |
| 1685 | GGCCTACATGTGTCCTGCCT | 2135 |
| 1686 | ATACCACCGGGCGGCAAAGC | 2136 |
| 1687 | AGATGAGAAAGCTTATCTAA | 2137 |
| 1688 | CGAGACAAGCCGGGGCTCCC | 2138 |
| 1689 | ACCCTGCTATGCCAGCTGGG | 2139 |
| 1690 | TCCAGGTTAGGCCACTTCAC | 2140 |
| 1691 | CCTGATGCTATAGGTCCATC | 2141 |
| 1692 | CATCCAGCTCATAACCCTAA | 2142 |
| 1693 | CTTCAAGGAATGTGAGGTAT | 2143 |
| 1694 | AGGACCAGAGGGACCTGGGA | 2144 |
| 1695 | TATTGTCACAGATACTCCAG | 2145 |
| 1696 | GGGCCTAGGTTCGGAATGCC | 2146 |
| 1697 | TCTACAGGGACTTCCGGCAG | 2147 |
| 1698 | TAGCCATGACCTAATTATTT | 2148 |
| 1699 | GCTCAAAGCTGACCCACCGT | 2149 |
| 1700 | ACAACATACAAAGTGGGGAT | 2150 |
| 1701 | CACAACACTTTTGGGGGTGA | 2151 |
| 1702 | ACAGAACCCCCTGGTCCACA | 2152 |
| 1703 | CAGCCATGCCTTGTCGCAGA | 2153 |
| 1704 | GAGAGTCAGAAGAGATGCAC | 2154 |
| 1705 | TTCAATATGTTGATGGAGAG | 2155 |
| 1706 | AAAATAAAGTAGGAGTACTC | 2156 |
| 1707 | TGCAGCAGGAGGGAGGTAGG | 2157 |
| 1708 | CCAGAAGAGAAGGGATCGCC | 2158 |
| 1709 | CGCGACTACTGCGCGCGGGA | 2159 |
| 1710 | CATCAACACCAACGTGCAGG | 2160 |
| 1711 | TTGTTAAGGGCTATGCCGGG | 2161 |
| 1712 | GATGGAGACACTGTACCTGC | 2162 |
| 1713 | GGGGCACAGGTAGAGCTGGG | 2163 |
| 1714 | CAGAGATGAAAGAGGATCTG | 2164 |
| 1715 | AAATGACATCCCAGGAGAAA | 2165 |
| 1716 | GCTAGCCCCAATGGATTTGC | 2166 |
| 1717 | CTACCTTGCCCATGAAATCT | 2167 |
| 1718 | AACAATACAGCTTTTAGAAA | 2168 |
| 1719 | CAGCTGTCAGGCTTTGGAGC | 2169 |
| 1720 | ATCTCAGCCAGGGGGGCCTG | 2170 |
| 1721 | GGAGCGACCAGGAGGCCATC | 2171 |
| 1722 | GGCGCCGTAGGCCACGGCCC | 2172 |
| 1723 | TCTAGTCCAGGACCCGGTGC | 2173 |
| 1724 | CAGGCCACAGCCAGGGGAGG | 2174 |
| 1725 | GGAGACGTAGAGGGACAGCA | 2175 |
| 1726 | GACAATGATGTTAGATGCAG | 2176 |
| 1727 | GTTTTAGATAGACCTTAATG | 2177 |
| 1728 | CCCAGCGTTGCTGGGGCTCC | 2178 |
| 1729 | GCCGAGCAGGCTGGCCACCA | 2179 |
| 1730 | CATGAAGTCATGTCCCCGGA | 2180 |
| 1731 | AGATAAGCAGTCCCTCCAAA | 2181 |
| 1732 | GTTGATAACGCTGGTCCTGC | 2182 |
| 1733 | CAGCCACACCAGTACTTCAT | 2183 |
| 1734 | CCACAGGCACCAGGTGGGCC | 2184 |
| 1735 | GGAACCACCAGACGTTGGCC | 2185 |
| 1736 | CCTGGCAGTAGGCACCCAGC | 2186 |
| 1737 | TACTTACAAGCTAAGGATCA | 2187 |
| 1738 | AAGTTCTTAAAGTTCCTGGT | 2188 |
| 1739 | AAGATAGAAAATTAATTATT | 2189 |
| 1740 | AAAGATGACAAAGGAAATCC | 2190 |
| 1741 | TGGTTAAACTGCTCTGATCA | 2191 |
| 1742 | CTCTCAGAATTGGTCAAAGA | 2192 |
| 1743 | GAGCAAATTTGGATAAAGGA | 2193 |
| 1744 | GAAGAAAAGAACTGTGAATT | 2194 |
| 1745 | CCTCTCAGTATTCTTGGACC | 2195 |
| 1746 | CAGCAGAAGAAAAGGTGAGA | 2196 |
| 1747 | GCTGATGAGAAGGGTCCCTC | 2197 |
| 1748 | CTAGGGCCGGCAGCAGTGAC | 2198 |
| 1749 | ATGGGCTAAGCGCTCAGTTT | 2199 |
| 1750 | GGTCAGGGTGGCTTATGCAA | 2200 |
| 1751 | TCTGAGTTTCGAGTCAGGGG | 2201 |
| 1752 | GCACTAAGAGCACTGCGAAC | 2202 |
| 1753 | CATGGACCCATGTGCTGGTG | 2203 |
| 1754 | CGGAGGCGGCCCACGATGGA | 2204 |
| 1755 | TGGCCGTCACATTGTTGTCC | 2205 |
| 1756 | GGTCCAGACCCACTGGCTGC | 2206 |
| 1757 | CCTCCAGGATTCCAGAACCT | 2207 |
| 1758 | GAAGGGCACATGCCAGACAC | 2208 |
| 1759 | ACCTGATGTGGTTGGTGCTG | 2209 |
| 1760 | TTGCTAAGGGGTATCTACAG | 2210 |
| 1761 | CCCTGATTCAAGCGCACCCT | 2211 |
| 1762 | GCTAGTCCTCAGACTTCACG | 2212 |
| 1763 | GAACATGGTCGCTCTGGACA | 2213 |
| 1764 | GGATCAAGCCTTCACGTTGC | 2214 |
| 1765 | CTGGGACACTTCTTCTTCTC | 2215 |
| 1766 | GCTGCAGCCGGGAGAGTTCG | 2216 |
| 1767 | GCGCGAGCAGCGCAATGGTC | 2217 |
| 1768 | AATCAGTTGAAGCGCCATTC | 2218 |
| 1769 | CTACCCGTCCGTGAACTTCC | 2219 |
| 1770 | CTGAGGGGCCATGGATGCTA | 2220 |
| 1771 | CCGGATGAGAAAGGTGAAGG | 2221 |
| 1772 | TGGGGACCCAGCGCACGCAG | 2222 |
| 1773 | GCCATGCGCGCCTGGAGAGC | 2223 |
| 1774 | AAGCTCACTCCATGCAGTAC | 2224 |
| 1775 | CTGTGGCAGAGGGACAGGAC | 2225 |
| 1776 | GAGCCTCAGGTGGCAGCCCC | 2226 |
| 1777 | CAGGCTAGCCTGGTGGGCCC | 2227 |
| 1778 | CTCGAGGCACTCTGGCAGCA | 2228 |
| 1779 | CCGCCCACACCTGCAGGGAG | 2229 |
| 1780 | CAGTATGTGCAGGTACCCTG | 2230 |
| 1781 | GCATGGTGAACACGTCCTGC | 2231 |
| 1782 | GGACATGAGTTTCAGCACGC | 2232 |
| 1783 | AGAGATGAAACTGGCCCTCC | 2233 |
| 1784 | GGCTTAGACCTGGGAGGCGG | 2234 |
| 1785 | AAGCTACACTCCAGCTGGAT | 2235 |
| 1786 | CCTGACCCTGTTGGTGCTGC | 2236 |
| 1787 | CCTGTCGATGTAAACCACGA | 2237 |
| 1788 | TCGCTATTCAATTTCCTGTT | 2238 |
| 1789 | AATAGTGCCCCTGGACAAAG | 2239 |
| 1790 | CCTAGGAGCCCGGGAATACC | 2240 |
| 1791 | ATTTGCAGTGGACGATGGAA | 2241 |
| 1792 | GCGGCTAGGGCTTGGTCTGG | 2242 |
| 1793 | CTGGGCAGGGATGGCTGCCT | 2243 |
| 1794 | TCTTCACAGGGAAGTTTTGG | 2244 |
| 1795 | TCCAGCCTAGGCCTTGAACC | 2245 |
| 1796 | ATCCTACAGGTGCAGCACCA | 2246 |
| 1797 | CACCTGAGAAGTCGGCTGAG | 2247 |
| 1798 | TGCGGCAGAAGGCTGATAGG | 2248 |
| 1799 | CCCGATCCCCCTGGTACATC | 2249 |
| 1800 | CCGTGACAGTGATGGAAGTG | 2250 |
| 1801 | CCCAGTCCTGCTGGAAGTCG | 2251 |
| 1802 | AATGCGCCACAAAACCCTGC | 2252 |
| 1803 | CACTCAATCCCAGGGGCTCT | 2253 |
| 1804 | TGTACGAAAAATGTGAGTTA | 2254 |
| 1805 | CGCTATCCAGCAATACCTTG | 2255 |
| 1806 | AGTGATGAAGAAGGAAAGAG | 2256 |
| 1807 | CCCTAGTGGGACACCTCCTC | 2257 |
| 1808 | GATCCTGATGTCGGAGGACC | 2258 |
| 1809 | CCACTACAAACTTGTTGGTG | 2259 |
| 1810 | GTATTACCGCCCCCGGTAGT | 2260 |
| 1811 | GACTATGTGCATTTTAGGCC | 2261 |
| 1812 | GGCCGCAGCAAGTGTGAATG | 2262 |
| 1813 | CCCTGAGGAGCCTGGTCTCA | 2263 |
| 1814 | TGTCTATCCTAGGTGTTTGT | 2264 |
| 1815 | AAAGATGATGCTGGCCAACC | 2265 |
| 1816 | GTAAGAGTCCACACCAGCTG | 2266 |
| 1817 | GCTGATCCTGCTGGTCCCGC | 2267 |
| 1818 | GTGGGTATGAACCACTGTAT | 2268 |
| 1819 | CAAAGCATTCGGTGATGAAG | 2269 |
| 1820 | ACCTCAGCTAGCGAGCTCTC | 2270 |
| 1821 | ATGGGAACCGCTACTTCAAG | 2271 |
| 1822 | GCAGCACGACACTGTGGCCA | 2272 |
| 1823 | GAGTCATCCCCTCTTGTTCA | 2273 |
| 1824 | CGATGTCTACTGCCCTCTGG | 2274 |
| 1825 | GACCTGCACCACACCTTCAT | 2275 |
| 1826 | CACCCACTACCTGGTGTTAG | 2276 |
| 1827 | CGCCCATGTGCACTCGGATG | 2277 |
| 1828 | CCCTAGCTTCGCTGGTGAGA | 2278 |
| 1829 | GGTGGCCCATGTAGCCTGGG | 2279 |
| 1830 | CCAGCAAGGCGGCAAAGAGC | 2280 |
| 1831 | CCACTTTCTCATGTGCAACC | 2281 |
| 1832 | TGGGCCACTTGACGCGGTCC | 2282 |
| 1833 | GGAACGAAGCCGCCCAGGAA | 2283 |
| 1834 | TCGAGTTCCTGGAAAGATAA | 2284 |
| 1835 | AGCTCTAGTCCATGATGAGG | 2285 |
| 1836 | GCCATTCGCTAAACCCCAAC | 2286 |
| 1837 | AGCCCGCCACTGAGGAGGCC | 2287 |
| 1838 | AGTAGGAAACCAGGAGCTAA | 2288 |
| 1839 | TTGGTCCTATCGGTTCATGA | 2289 |
| 1840 | CGAGCAGGTGCACAAGGTCA | 2290 |
| 1841 | GTGTAATGGAGGGCCAGGGG | 2291 |
| 1842 | CAGCTAGTCTCCTGAGAAGA | 2292 |
| 1843 | CAGCCCCTACTTCCTGCATA | 2293 |
| 1844 | GGGGACTGGTTTGCCATCCG | 2294 |
| 1845 | AATGACTCTCCTGGTGCCCC | 2295 |
| 1846 | TTGGCAGATGGCACCAGTGC | 2296 |
| 1847 | CCTGAACCCCGCGGTATTCC | 2297 |
| 1848 | TACTGCTAGGGTGGGCGGAC | 2298 |
| 1849 | ACGAGTTTCTCTGGGGGCAC | 2299 |
| 1850 | GCCTGCTAGGCCACTTCACG | 2300 |
| 1851 | GTGTGAGAACGACCTCTCTC | 2301 |
| 1852 | GCTCTACTCGCCGCCGAGGT | 2302 |
| 1853 | CCTGATCCTGCTGGAGCCAC | 2303 |
| 1854 | GCTACTTGCGCTTCTCGTGC | 2304 |
| 1855 | GTCGGACCAAGTGGCGCAAG | 2305 |
| 1856 | CTCAGAAGTCAGATGCACCA | 2306 |
| 1857 | CCTCATTCTCCATTCTTACC | 2307 |
| 1858 | GGATGCTGGTGAAGCCACCT | 2308 |
| 1859 | CTACTTCTCAGTCAAGAGCT | 2309 |
| 1860 | AAAGATCCAGCTGGGATACC | 2310 |
| 1861 | TCCTGAGTTGCTGTCCCCCA | 2311 |
| 1862 | CCTAGAGTCAACGGTGCTCC | 2312 |
| 1863 | GTTAGTCCCCCTGGCTTCGC | 2313 |
| 1864 | AGTGTGAGCCGCCATCGGCG | 2314 |
| 1865 | CCACTAGAAACTTTCCCCCA | 2315 |
| 1866 | TGCGCAGGCGCCGCTGCTGC | 2316 |
| 1867 | TCTGCAAACACCTTTTCTAT | 2317 |
| 1868 | GGTTTAAATGGTTTCCCCAG | 2318 |
| 1869 | CCCCAGAGACGATGTAAGTG | 2319 |
| 1870 | CAGGATCCCCCTGGTCCTCC | 2320 |
| 1871 | TCCCCACTCCATTGTGGCCC | 2321 |
| 1872 | TGGCGTATGGAAAAAGCAAC | 2322 |
| 1873 | CTCAGCTGGAGAGAAGTCGA | 2323 |
| 1874 | CACCTAGCTCTTGAATGACA | 2324 |
| 1875 | CGTAGTCTTCCTGGAGCTGA | 2325 |
| 1876 | GGACGTCCCGCCGGGGTCGC | 2326 |
| 1877 | CAGGGCTACAGCAGCAGCAT | 2327 |
| 1878 | GCCTCCCAGCAGGTGCGATG | 2328 |
| 1879 | TCTTACTCGAGATGTGATGA | 2329 |
| 1880 | GATGACCCTCCTGGACTCCC | 2330 |
| 1881 | ACTGGCCTAGAGCGGCCAGG | 2331 |
| 1882 | ACCTCAAAGGGAGAAGCCAA | 2332 |
| 1883 | TCAGGCTAAGGGGACAGATG | 2333 |
| 1884 | CAGCACCTCCCAGTTCTGAG | 2334 |
| 1885 | GCTGAGGCTCCCGGCCTCCC | 2335 |
| 1886 | GACTCTTATGCAGGTTCGGG | 2336 |
| 1887 | CCTATGCAGCCAGCACACCT | 2337 |
| 1888 | GGATCAGCTTCATTGTGCTG | 2338 |
| 1889 | TCTTAAGGGCTGGATGGTGG | 2339 |
| 1890 | CATCTATGTGGCCTGTCTCC | 2340 |
| 1891 | CCATCAGCCTGGGCAACGTC | 2341 |
| 1892 | AGTCCAGCCAGAAGGCGTGC | 2342 |
| 1893 | AAGGATGATGCCGGTGCACC | 2343 |
| 1894 | GCTAGGGGGAACTGAGCACC | 2344 |
| 1895 | TCCTTTATGGAGTTTTAAAT | 2345 |
| 1896 | TCCAACTACAGCGTCTCCTT | 2346 |
| 1897 | ATGCCCTAGGGCCCCTGGGG | 2347 |
| 1898 | GGACTATGAAATAATGCTGT | 2348 |
| 1899 | GGGCCTAGTCTTCCAGGGTG | 2349 |
| 1900 | GGCTACGCAGGGGCCCCCGT | 2350 |
| 1901 | ACTGATTTCCCTGGTGCTGC | 2351 |
| 1902 | CCCCAATGACGGCCAGCAGG | 2352 |
| 1903 | ACTGGAGCCCCGGAACTCAA | 2353 |
| 1904 | GCATCATCCCATGTCTTTAG | 2354 |
| 1905 | CGTGAGCTTCCTGGTGAGAG | 2355 |
| 1906 | GCTCTCAGAGCACCGGGTGC | 2356 |
| 1907 | CATGCACTCCAGGTGGGCGC | 2357 |
| 1908 | ACCTGACCCACCTGGACATT | 2358 |
| 1909 | CCAGAGCCTCGAGGTAACAG | 2359 |
| 1910 | CTTGACCTTGAAGGTCATGT | 2360 |
| 1911 | CCTGATGCTGCTGGTACTCC | 2361 |
| 1912 | TGACCACCTGGCCTCCTACC | 2362 |
| 1913 | TGTGGCTGCAGATGGTGTGT | 2363 |
| 1914 | GGGGGGCAAGCAGCTGCTGC | 2364 |
| 1915 | AATCTAGGTCTGGTCTCCAT | 2365 |
| 1916 | ACTACCTATTATCTGAGCTC | 2366 |
| 1917 | CCGAGAGCCCCAGGTCGAGA | 2367 |
| 1918 | CTTCCAGAGGTGCTTGAATC | 2368 |
| 1919 | GTGGATCCTGCTGGCAAACA | 2369 |
| 1920 | CCGGGCAGATGGTCTCAGTG | 2370 |
| 1921 | CCAGGAGCCTGTGGGGCTCC | 2371 |
| 1922 | TCCTAGTCCAAAGGGTGACA | 2372 |
| 1923 | GCTGCAGGTGACCGAGGGCT | 2373 |
| 1924 | GGAGACCCTCCTGGAGTTGC | 2374 |
| 1925 | GCCGATGCACCTGGAGCTCC | 2375 |
| 1926 | CATGGATGCTCAGCGTGATG | 2376 |
| 1927 | TGGGGGATCACTTCCGCATG | 2377 |
| 1928 | GATCCGGACAGGGGCCTCCC | 2378 |
| 1929 | CACTCAGGAGAAAGGGTCGG | 2379 |
| 1930 | TCTCCCTCTACACACTGCCT | 2380 |
| 1931 | CCCAGGCTGGCAGGACACAA | 2381 |
| 1932 | AGATTAGATGAACCGCATGG | 2382 |
| 1933 | CCCAAGTGCCCCTGGCCCCA | 2383 |
| 1934 | GGGCCCTTAGTGCGTCATCC | 2384 |
| 1935 | GCCAGCCCTCCAGGACCTCC | 2385 |
| 1936 | TGCTACTGCTGTTGTTGCTG | 2386 |
| 1937 | CTTACTCGCCGGAGTCCCCT | 2387 |
| 1938 | CTTCGCTTCATCCTCTCCTC | 2388 |
| 1939 | GTCCTACTGGTCCAGGGGGC | 2389 |
| 1940 | TCCGGTAGAACAGGGACTCC | 2390 |
| 1941 | CCTGAACCCCAGGGTCTTCC | 2391 |
| 1942 | CGTCGTGCTACAAGCCAACG | 2392 |
| 1943 | ATTGCTGGATGACTGGATGG | 2393 |
| 1944 | CAAGTACTCGTGCTAGAACT | 2394 |
| 1945 | ACCACCTGGTACTTGCTGGC | 2395 |
| 1946 | GGCCCAGCCTGCCAAGAGGA | 2396 |
| 1947 | GAGTTACTGCATTGCTGACC | 2397 |
| 1948 | CGTCTCAGTCATGGTACCTG | 2398 |
| 1949 | AGCTCGTACCCAACCAGGTT | 2399 |
| 1950 | CTTCAGGGAGCGCTTTTCTA | 2400 |
| 1951 | CCACCATGAGGCTAGGAGGA | 2401 |
| 1952 | TCACTCCCCATTCACCCTGA | 2402 |
| 1953 | CGTGATCCACCAGGCTCAAG | 2403 |
| 1954 | CCACATGTCCATCATCGTGC | 2404 |
| 1955 | GGCCCCCACCGCGGGTAGGT | 2405 |
| 1956 | CCAGAGCCCCCCGGCCCCAA | 2406 |
| 1957 | GACAGTGCTCGAGGCAGTGA | 2407 |
| 1958 | GGGCTAGAGACCCCCAAGGC | 2408 |
| 1959 | GCACTCAGGGCGCCTCTGCC | 2409 |
| 1960 | TCTAGCCCTGCGTGGAGCCC | 2410 |
| 1961 | AGCTCTATCGCTGGGCAAAG | 2411 |
| 1962 | CCAGAGCAACCAGGCCCTCC | 2412 |
| 1963 | TCAGCCTAGTTCCAGGGGAT | 2413 |
| 1964 | TGTACCCGTAAGGGGAAGTA | 2414 |
| 1965 | TCTGAGGAGGCTGTAGGGTT | 2415 |
| 1966 | TCGCTCTAGAGGTCGTGGAA | 2416 |
| 1967 | GTAAGTGGCCTCTTTATATG | 2417 |
| 1968 | CACTACGAAAAGGCCTGTGG | 2418 |
| 1969 | CGCTGGCAAGTATGGTGCGG | 2419 |
| 1970 | ACTTTACTGTTCGGAACTAC | 2420 |
| 1971 | CACTACTGCATCATAGATGA | 2421 |
| 1972 | CATCCAGAGTGGGCCTTGCC | 2422 |
| 1973 | AGGATAGTAAACTTATCATC | 2423 |
| 1974 | AGAGCTAGTCACGGTGGAAG | 2424 |
| 1975 | CCTAGGCGTCCTCACGACTT | 2425 |
| 1976 | ACCAGGCTGCGTGAGTGTGA | 2426 |
| 1977 | GTGTTCAATGCAGATGAAAT | 2427 |
| 1978 | GCTCACTGGTATACCAAACT | 2428 |
| 1979 | CTCATGGTGCTCTGGACCGA | 2429 |
| 1980 | CCTAGACCTCCAGGTGTAAG | 2430 |
| 1981 | CCCACTGCAGGATGTGGTGC | 2431 |
| 1982 | CGGCATTCAGCTGACTCGCA | 2432 |
| 1983 | TTTGCTAAGACTGATTACTT | 2433 |
| 1984 | TCATTTAGAACAGTCTACAA | 2434 |
| 1985 | GTCCCTCCACCACAGTGGAG | 2435 |
| 1986 | GCAGCAGGGTCTCGGAGATC | 2436 |
| 1987 | GTGGCACATGCAGCACAGGA | 2437 |
| 1988 | GGGCTCTAGCCCACGTACGG | 2438 |
| 1989 | AGAACTTGCCAAGTGCCCGC | 2439 |
| 1990 | CCTGAGTTCCGAGGACCTGC | 2440 |
| 1991 | CCTCCAGAAATGCTGGTAGC | 2441 |
| 1992 | TTAATTCACAATTCTTGATG | 2442 |
| 1993 | CTGCCAGGGCGATGGGGGCA | 2443 |
| 1994 | CCTTAGCGGCCAGTGGGTCC | 2444 |
| 1995 | GGTAGGCTCTGGCCCACGTA | 2445 |
| 1996 | TGCACTTGAACCAGGGGTGC | 2446 |
| 1997 | CGCCTCGAGCCTGCTCATGG | 2447 |
| 1998 | CTCCATCTCGCAGTAGTCGC | 2448 |
| 1999 | CTGGTAGACAGGCCTGGCAG | 2449 |
| 2000 | GGGGGATGCCCACGGCACGC | 2450 |
| 2001 | AGTGCTGCACTGCCTGGGTC | 2451 |
| 2002 | GGCCATGCATGTGTTCAGAA | 2452 |
| 2003 | GGTGGACTCATCCTGGGGGG | 2453 |
| 2004 | TCAAAGTGCTCCTGGCTCCG | 2454 |
| 2005 | TGTCTCAGTTCTCACTGGTC | 2455 |
| 2006 | AGCTGACTGGCTACACAGCC | 2456 |
| 2007 | CCGCCACCAGGCGCAGGTCG | 2457 |
| 2008 | GGTGGTCCAGGAGCGAGCAG | 2458 |
| 2009 | GTATGATGTGGTGGTGGCAG | 2459 |
| 2010 | AGCACTCCTCAGCATCTGCC | 2460 |
| 2011 | ATCTAGGAACCTGATGACGC | 2461 |
| 2012 | CTTGGATGGGGTCCACACCG | 2462 |
| 2013 | ACTTGCTACTGCTGTTGTCC | 2463 |
| 2014 | AGCCACTGGGTCATGGTCTC | 2464 |
| 2015 | CCCAATGCTGCCTGCATTCG | 2465 |
| 2016 | ACACCCATCGCATTGGAGAA | 2466 |
| 2017 | GTTAGTGCTGCCGGTGCTAC | 2467 |
| 2018 | GGGAGGCTAGAAGCCGCGCG | 2468 |
| 2019 | TGTTCAAGGTGAACCATTAA | 2469 |
| 2020 | CTGCAGGCCTCGTCTGGGGG | 2470 |
| 2021 | TGGCTAGGACTGAGAGACCA | 2471 |
| 2022 | TCCTGCTCAGTCCGCCTTCC | 2472 |
| 2023 | TCCCTATGGGGGGCCACTGG | 2473 |
| 2024 | GCGGCTGCTACCCTAGACGC | 2474 |
| 2025 | AGCCTACCATTCATGGAATT | 2475 |
| 2026 | ACATATCCTTGGCCCTGAAT | 2476 |
| 2027 | CCCAGCCTCCCTGGACCCCG | 2477 |
| 2028 | CGTGGACCGTGGTACCTGGG | 2478 |
| 2029 | CAGCTACAGCCACCTTAGTT | 2479 |
| 2030 | CGATGAGACCCAGACAAGGC | 2480 |
| 2031 | CTAGTTCTCGAGGCCCGCTG | 2481 |
| 2032 | AGCTGCTATAAAGAGCCCAT | 2482 |
| 2033 | TCTCTTAGCGCACAAAGCCC | 2483 |
| 2034 | CTGGAGCCGGCAGCAGTGAC | 2484 |
| 2035 | AGTGAACCTCCTGGCAAAGA | 2485 |
| 2036 | CCCAGACGTGCCTGGACCCA | 2486 |
| 2037 | CCTGTTAGCTCGGAATGGCT | 2487 |
| 2038 | ACCGAGCTGCGTGAGTGTGA | 2488 |
| 2039 | AGGCCCTCAAGGCGAGCTGC | 2489 |
| 2040 | TTGGTAGCAACAGACCCGTC | 2490 |
| 2041 | GTCTATGTGACAGATGCCTC | 2491 |
| 2042 | ATGTCTCACGGTACCTTGTC | 2492 |
| 2043 | GGCTCTACCGGACTGCATCC | 2493 |
| 2044 | TGTATGGACCTCTTTGCCCC | 2494 |
| 2045 | CTTCAGGGAGGTGAACCAGC | 2495 |
| 2046 | CCCCAGACCCCCTGGCCCCA | 2496 |
| 2047 | GACGCAGATCTGGACACCAG | 2497 |
| 2048 | AGCCTACCTCTGGGCCTCCT | 2498 |
| 2049 | GCTAGTCCTCCTGGGCCACC | 2499 |
| 2050 | CCTAGCGCCAGCAGATCCAA | 2500 |
| 2051 | CGTGAAGCTGCTGGCATCAA | 2501 |
| 2052 | CCGGCAAGCCAACACCTTCT | 2502 |
| 2053 | GCCAGGTCAGCGAAGGTCAG | 2503 |
| 2054 | CCTGCTACACCAGGGCCTGG | 2504 |
| 2055 | GCTCCTCAGGGGCGCTCCCC | 2505 |
| 2056 | GCAACCACTGCCTGAAGGAA | 2506 |
| 2057 | CCTCAAGGCCCTGGGGGACC | 2507 |
| 2058 | CTCCTAGAACCCACCCAAAA | 2508 |
| 2059 | TGGCTACAGCTGCAGAGAGC | 2509 |
| 2060 | GGGCTACGCGCACGACTTGA | 2510 |
| 2061 | CAAGGTCTATGTCTTTTCCT | 2511 |
| 2062 | CCTAGTCCAGCTGGCTCCAA | 2512 |
| 2063 | CTGGGAGAATGGCCACCACT | 2513 |
| 2064 | AGAGAAGCTGCTGGAGAACC | 2514 |
| 2065 | CCTGACGCTCCTGGTCATCC | 2515 |
| 2066 | AATGCCACTGTGACCGCAAG | 2516 |
| 2067 | GCTAGCCCACCTTGCTGCTC | 2517 |
| 2068 | GGCCGTGTAGAATGCCCAGG | 2518 |
| 2069 | CGTAGTGCAAGTGGCCCTGC | 2519 |
| 2070 | CTCCTGATGCATTGAGGCAC | 2520 |
| 2071 | CTCGTGCTACAGCCCCCCTG | 2521 |
| 2072 | TCTAGGGAGCTATGCCAGGA | 2522 |
| 2073 | CCGGCTGCAGGATAGGCAGG | 2523 |
| 2074 | TTCACCTAGTCCAGATGCCC | 2524 |
| 2075 | CTCAGTTCCGGATCAGGATC | 2525 |
| 2076 | TGCTCACTGATAGAAAGCTT | 2526 |
| 2077 | GCCAGGGAGCCTGGAAAGCC | 2527 |
| 2078 | TTTCCCCAGATTCCCTGGAC | 2528 |
| 2079 | TCCACTTCACCCCCGGCTTG | 2529 |
| 2080 | GTAGATGCCCCTGGTCCTGC | 2530 |
| 2081 | TCCTCAGTGAGATCATTGAA | 2531 |
| 2082 | TACCTATGCAGAACCCAAAG | 2532 |
| 2083 | AGAGGGGGTAGCACATGGGC | 2533 |
| 2084 | TTTGCTACTGACACATAAAA | 2534 |
| 2085 | CCAGACTTCCCAGGTGCCCC | 2535 |
| 2086 | CACCTAGCTCGTCTCCGTCT | 2536 |
| 2087 | GCTAGTTGGAGCTGACGCTT | 2537 |
| 2088 | ACCTGACCGTGAACCCACAG | 2538 |
| 2089 | CCAAGGCCTCCCGGTCTCCC | 2539 |
| 2090 | CCGGCAGGTCTACATTGAGC | 2540 |
| 2091 | CGGGGTATGGTGGAGTACTT | 2541 |
| 2092 | GGTCTGATCTCTGATCCAGC | 2542 |
| 2093 | AATGAATTGCAAGGTCTGCC | 2543 |
| 2094 | TACTAGGGAGGCTCTGGGCC | 2544 |
| 2095 | ACCCTACTGTGCCAGCTGGG | 2545 |
| 2096 | CGCCAGTCCCCGTGGTGAAG | 2546 |
| 2097 | TCCCACGGGCGCCCGTGCGC | 2547 |
| 2098 | CAAGTAGCTGGCCAACTTCT | 2548 |
| 2099 | GGCTTACGCTTCCAGAGCTT | 2549 |
| 2100 | GAACTACCTCTTGAGTCTTT | 2550 |
| 2101 | CACTACAGGCCCGGCACGTC | 2551 |
| 2102 | TCCCCAGCCGCCTGCAAGGA | 2552 |
| 2103 | AGAAGTGAACGTGGTCTACC | 2553 |
| 2104 | TTTGGAGAGCCACTCCAAGA | 2554 |
| 2105 | CCTACTCCCGGATGTTCTTG | 2555 |
| 2106 | GCCCCACTCACACCTGAGAG | 2556 |
| 2107 | GCTGATCCCCCTGGTCCCGA | 2557 |
| 2108 | GTCAGGCCAGTGCTCGCCAC | 2558 |
| 2109 | TGGACAGCTGGTGGGTCATC | 2559 |
| 2110 | GACTAGGCTCCCAGGGCACA | 2560 |
| 2111 | CGTAGTGAGGTCGGTCCTGC | 2561 |
| 2112 | ATCATGGGCCGCGTGTGGAT | 2562 |
| 2113 | GGGGCCCCATGAGGGAGACA | 2563 |
| 2114 | GCCCAGCCTCCCGGGTCCCC | 2564 |
| 2115 | TCCTAGGGAAGCTGACAAAG | 2565 |
| 2116 | GTATCGGGGGCGGCCCACGA | 2566 |
| 2117 | CCTAGGCAATGATGGCAATG | 2567 |
| 2118 | GGCATGGCTGCTTGGTCTCC | 2568 |
| 2119 | GTGTCTACTGTCTAAGTGCT | 2569 |
| 2120 | CGCAAGGTCCTCTTCACCAC | 2570 |
| 2121 | GGGGCAAGCGGCTGCGCGCG | 2571 |
| 2122 | AGAGGCATGTGGCCAGCAGC | 2572 |
| 2123 | CTGCTAGCTCAGGCTCTTGA | 2573 |
| 2124 | GGTGCCAGGCCTCCGTGGTG | 2574 |
| 2125 | CACCCACTGCATCACACCCA | 2575 |
| 2126 | AATAGCCCAAAGAATCTCAA | 2576 |
| 2127 | TACTAGGTTGACCCTAACCA | 2577 |
| 2128 | CCACTATCAGTGGGTAGATG | 2578 |
| 2129 | TGCCATAAGCCTTCACCTTA | 2579 |
| 2130 | CCAGACCCACCTGGTCCTGT | 2580 |
| 2131 | CCTAGTCCCCCTGGCCCTCC | 2581 |
| 2132 | GGACCACTTCCTCATTCATC | 2582 |
| 2133 | CCTGATTCTCGTGGTCTTCC | 2583 |
| 2134 | TCCGTTACCTCAGCAGCCGC | 2584 |
| 2135 | GCTATGACTCTTGAGACTTG | 2585 |
| 2136 | TGATCCTGCCGGAGGCGTAG | 2586 |
| 2137 | CAACCCCACCAGCTGCTTGT | 2587 |
| 2138 | ACGATATGTCGCCAGATCAA | 2588 |
| 2139 | CCTTATTCCAATCCCAGGTA | 2589 |
| 2140 | CATGCAGCCTCTGTCCAACA | 2590 |
| 2141 | GCTAGTTCACGCCCGCGCCC | 2591 |
| 2142 | CCAGACCCTCCTGGACCTCC | 2592 |
| 2143 | CTACCTGCACATCTGGGTGC | 2593 |
| 2144 | CTGCTAGGGCATCATGGCAG | 2594 |
| 2145 | TCCTTCTGAGCTCGCTGCTG | 2595 |
| 2146 | AAGGCAGCGTGGCACTAGGA | 2596 |
| 2147 | ACCCATCTCCACTGGGGTTT | 2597 |
| 2148 | CAAGACCCACGTGGTGACAA | 2598 |
| 2149 | AAACCCAGCCCCAGCTCCCA | 2599 |
| 2150 | CCTTCACCCTGACGCTCTCC | 2600 |
| 2151 | TGATCACTGTGAGGCTCCAT | 2601 |
| 2152 | AGGTTATCCACAGGTCCTTG | 2602 |
| 2153 | GGTGCACGCAAACACCATCT | 2603 |
| 2154 | CGCAGCCATGGAGGGTGATC | 2604 |
| 2155 | CTCCCAGCAGCCCCTGGGAA | 2605 |
| 2156 | TGCTAGGCATGGACTGGGGC | 2606 |
| 2157 | TCTTAGAAGTCCTGGTCCAA | 2607 |
| 2158 | CTCTAGGGAGGAGAAATCCC | 2608 |
| 2159 | TCTTATGCAATGAACATCAA | 2609 |
| 2160 | CATAGTTGCAGCCCAAGTCA | 2610 |
| 2161 | CCCTCAAGGACGCCGACCTG | 2611 |
| 2162 | TCTAGGTCATTCCAACCCCC | 2612 |
| 2163 | TTCCTAGGAGAGATGGATGG | 2613 |
| 2164 | GCAAGTGATGGCGACCTAGT | 2614 |
| 2165 | GGCCTAGCTGCCCTGTGAGC | 2615 |
| 2166 | CCGGGACCAGCCTGCAGGAA | 2616 |
| 2167 | CAACTATAATCCAGCTCCAG | 2617 |
| 2168 | CTGACCGCCCTCGGCGTCCG | 2618 |
| 2169 | GTCGTTCCACAGCCGTCTGG | 2619 |
| 2170 | AGACTAGAAACGCTCAAATA | 2620 |
| 2171 | CGCTGATGCATTCATCCAGG | 2621 |
| 2172 | CATAGCGATCCGCGAGAGCG | 2622 |
| 2173 | CCTGGTCAGCCAGGGGTACC | 2623 |
| 2174 | CGTACTCGATGGGGTACTTC | 2624 |
| 2175 | TCAGGCTAGGGGGACAGGTG | 2625 |
| 2176 | CTATTGCAATCCCTTAAGCA | 2626 |
| 2177 | AGCCGGACTTACAGTCACAG | 2627 |
| 2178 | GCAGAGGCCCCAGGACTTAG | 2628 |
| 2179 | CTTACAGGCCAGCCTGCCTA | 2629 |
| 2180 | GAATGATTCTTCACCAAGGT | 2630 |
| 2181 | GGTGGCCTATGGAGTTGCTA | 2631 |
| 2182 | AAAGATGAAGGAGGCCCTCC | 2632 |
| 2183 | CCGCTACAGCTTGTCCTGAG | 2633 |
| 2184 | CCACTACCTGCTGGTGACCC | 2634 |
| 2185 | GCCGCACCACTACGACGACC | 2635 |
| 2186 | CTTACCTGCCTGACACTTGC | 2636 |
| 2187 | CACGTAGCTTGCGCGGCGCG | 2637 |
| 2188 | GGTTAGGCAATACTGCCTTT | 2638 |
| 2189 | TCTGGAACCCAGGGGATCAC | 2639 |
| 2190 | CCTGATGCCCCTGGTGAAAA | 2640 |
| 2191 | CACCAGAAGCACTACTGACC | 2641 |
| 2192 | GTTAGGGGCCCAGAAGGTTC | 2642 |
| 2193 | GTGAGTCTTCCAGGCCTCTC | 2643 |
| 2194 | GGCATCTGGACTCTGTCACC | 2644 |
| 2195 | GTCAGTCCTGCTGGCCCCAA | 2645 |
| 2196 | GGAGCTAAACAACAAATGTT | 2646 |
| 2197 | GCCTGACCCTCGGCCATCGC | 2647 |
| 2198 | TGTTTTATTCCTTGCCCGTC | 2648 |
| 2199 | CTCACATCCAGATTCACCAG | 2649 |
| 2200 | CTCTCAGGAGATCTGAACGA | 2650 |
| 2201 | GAGGACCTCTTTTTCACCAA | 2651 |
| 2202 | CTTGAGGCGGCCGGGCCCGG | 2652 |
| 2203 | GCAGGTAGGCGATGGCCTCG | 2653 |
| 2204 | GTCTCATGCCTGCTCATGGT | 2654 |
| 2205 | GTCCTAGCCATACCACCTGC | 2655 |
| 2206 | CCTGATGTCAAAGGAGAAGC | 2656 |
| 2207 | GCGCTCCAGGTGTGCCGCCG | 2657 |
| 2208 | GGCGCCCTTATGCATTCTCG | 2658 |
| 2209 | AAACTACAGCAGCAGCCTGC | 2659 |
| 2210 | GTGTTCATGCAGCTGAAGTA | 2660 |
| 2211 | CAGCTAGATTACATGCTTCC | 2661 |
| 2212 | TCCATACGTGGCAGGCGTGG | 2662 |
| 2213 | GGCAGAAAGGCCAGGAGAGA | 2663 |
| 2214 | AGAAGGGCTCCTGGTGAGCG | 2664 |
| 2215 | CATGCAGTTGACCGTATAGA | 2665 |
| 2216 | ACACTAGAAGACTGTCAGCA | 2666 |
| 2217 | GGACTAGACATCTTTTAACC | 2667 |
| 2218 | GAATATCCCCCCAACTTCAC | 2668 |
| 2219 | GTCCACGGGCTACACCAAAC | 2669 |
| 2220 | ACTGACGTGATTGGACTTAC | 2670 |
| 2221 | TTCTTGATGGAAAGATGGGA | 2671 |
| 2222 | GGTTGACCTTGGGATTGAGG | 2672 |
| 2223 | CTACTGCAGCTTCTGCCAGG | 2673 |
| 2224 | GCCGGAGCTCCCAGGAGAGA | 2674 |
| 2225 | CGGCTTCCACCTCAGGCTCG | 2675 |
| 2226 | TGCAGTTGGCGTGGCTGAGC | 2676 |
| 2227 | CACCCACATCCCCCTGCAGA | 2677 |
| 2228 | TCCTCAGGGTCCCTCCTGGC | 2678 |
| 2229 | GCCCCTGATCCTTGCTGTGG | 2679 |
| 2230 | AGCCCCTCTAGCCATGCCAT | 2680 |
| 2231 | CCATGACCAGTGCAGCTGTG | 2681 |
| 2232 | AGAGCTAGCATTCAGACCTC | 2682 |
| 2233 | GCTGCAGCAACAACGGTTTT | 2683 |
| 2234 | GACCCTACTGCTGTTGCTGC | 2684 |
| 2235 | CCTGATCCCCAAGGTGTCAA | 2685 |
| 2236 | CAACCGCAAGAAGATGACCC | 2686 |
| 2237 | TGCCCACAACCTCCTGACAG | 2687 |
| 2238 | TGTGACCAGCTTTCAGGCAG | 2688 |
| 2239 | CTTAGTCTCCACCTGGATGC | 2689 |
| 2240 | CATCTAACCTGGCAGCTGGA | 2690 |
| 2241 | GAAGAGGCTGATGATGCTGG | 2691 |
| 2242 | TCACTTCCAGAAAGGCAGCA | 2692 |
| 2243 | ACACCCCGGCCTAAGCAGCG | 2693 |
| 2244 | CAGCCACTGCTTCTGGCCTC | 2694 |
| 2245 | AATCCATGTCTGGGCAGGGA | 2695 |
| 2246 | GATCAGACCCCCTGGGCTTC | 2696 |
| 2247 | CGAGGACCCCAGCGACCCTC | 2697 |
| 2248 | ATGCAAGTGAAACGGCTACG | 2698 |
| 2249 | GACCGAGGCGTGTCTCCAGC | 2699 |
| 2250 | ACGCCTGTAGTATGTTATGC | 2700 |
| 2251 | GTGGCAGCTAACTTTCCTTC | 2701 |
| 2252 | CCTAGGCAGGGGGTGGCTCC | 2702 |
| 2253 | GCTCACCTTCGGGATCAGCT | 2703 |
| 2254 | CCGTAGTCCTCCTGGTGCTG | 2704 |
| 2255 | TGAACCTACTCATCCACATT | 2705 |
| 2256 | CGGGATCTTGCAGGACCACC | 2706 |
| 2257 | GGCCATGCGGGAAAGAGCAG | 2707 |
| 2258 | CCTCCATGATGTTGATGCCA | 2708 |
| 2259 | TCACCACAGTCACCCTGGCG | 2709 |
| 2260 | CACCTGCCAGGCCCTGGGCG | 2710 |
| 2261 | CCAGATCTCCCTGGAACTCC | 2711 |
| 2262 | CAGGGAACCCAAGGGCTACA | 2712 |
| 2263 | CGGCTAGAAGTTCGAGAAGC | 2713 |
| 2264 | TTTCCTAGATCACCTCCAAC | 2714 |
| 2265 | TCCTACTCTGGGTCCTCCTC | 2715 |
| 2266 | TCAGCCTGCTGGCGGGTACG | 2716 |
| 2267 | GGGGGATCAGATAGGCCTGG | 2717 |
| 2268 | GAGGCAAAGCACCTCTCGGA | 2718 |
| 2269 | TATGGAGCGCTCAGCAGCTG | 2719 |
| 2270 | CAAGTCCTCAGAAATCCATC | 2720 |
| 2271 | TGATGAAAACAATGGTGCTC | 2721 |
| 2272 | AGCAGCCTCCTGCTCTACAA | 2722 |
| 2273 | GGGCTCAGTGGCCCACGGTC | 2723 |
| 2274 | CACAGGCAGCTTCAGGAGGC | 2724 |
| 2275 | CCTGAATCAGATGGTCTTCC | 2725 |
| 2276 | TGGTTCTTGATGTCCTTAGT | 2726 |
| 2277 | AGAGTATGCTCCTTTCTGCC | 2727 |
| 2278 | AGCTGCACAGCAGGGGCAGG | 2728 |
| 2279 | CGACTCAGCCAGCAGCACCA | 2729 |
| 2280 | TAGGAGAAGCCCTGGCCCTC | 2730 |
| 2281 | TTTCACTAGGGTTCACTTGA | 2731 |
| 2282 | CAGGTACACCCAGAGAGGCA | 2732 |
| 2283 | TTTCACTGCGCTCATCATGA | 2733 |
| 2284 | AAACTAGAGGGCTCCATGAT | 2734 |
| 2285 | CGGTAGCGCTGTCAGCGGCG | 2735 |
| 2286 | TGTTCCTAGCCACCTGGGGC | 2736 |
| 2287 | GCTCTGCTAGGGGGCGCTGG | 2737 |
| 2288 | CTGGAGAGTGGTCTCTGTGC | 2738 |
| 2289 | ATGGCATGGCGAAAAAGTGG | 2739 |
| 2290 | TGTGCTATGAAGGGGGTGTG | 2740 |
| 2291 | CAGCAGCCGGGATGCCGGCG | 2741 |
| 2292 | GGAGCATGAGGTAATCAGCC | 2742 |
| 2293 | CGCCCACCGCAGCAGCTTCA | 2743 |
| 2294 | ACACTCATGTATCTTCATTC | 2744 |
| 2295 | CACAGCCAGGGCTGGAGGTG | 2745 |
| 2296 | CTGTATGGAGGCTCCATCAT | 2746 |
| 2297 | GCAGTACCTGGCCATGGGCT | 2747 |
| 2298 | CCCCACCCCGGCAAGGCTGG | 2748 |
| 2299 | TAGCCCTATGACTTATCCTG | 2749 |
| 2300 | TGAGCTGCTAGTCCCAGCTG | 2750 |
| 2301 | CGTTGAGCACGGTCCCAAAG | 2751 |
| 2302 | ATCGACAGGCGCATTGTGGA | 2752 |
| 2303 | CACCTCAGTCTGCAGCTACA | 2753 |
| 2304 | CCTGATCCTCTTGGCATTGC | 2754 |
| 2305 | TGCTATTTCCGGACCTAACA | 2755 |
| 2306 | ACTCCCCACAGAGGTCCAGC | 2756 |
| 2307 | GACCCCTAGCTGCCTTGGAT | 2757 |
| 2308 | ATCCATTCCCGTACTTCCTT | 2758 |
| 2309 | TGCCTTGACCAGTGCCCCAG | 2759 |
| 2310 | TGGCTTAAGGGCTGATGTGT | 2760 |
| 2311 | GAGGCTGAGCAGCCACAGGA | 2761 |
| 2312 | CCTGAATCCAAAGGAGAGCA | 2762 |
| 2313 | GATCTACCCGCCCTGAGGCC | 2763 |
| 2314 | GCCAGGTTGCCAGGACTGCG | 2764 |
| 2315 | TGCCCACCGACTCCATACCT | 2765 |
| 2316 | GATCGCAGCCCGCCAGGTCC | 2766 |
| 2317 | GTCCAGGGAGGCTGCGCCTC | 2767 |
| 2318 | GCGCATGGCCGTGGAGGAGG | 2768 |
| 2319 | CCTGATTCCCTGAGGACCAG | 2769 |
| 2320 | CACTCACTTCTTCAGGGCAG | 2770 |
| 2321 | CCCAGTTCTCCTGGCCAGAA | 2771 |
| 2322 | CTGGATCATCTTCTCGCGGT | 2772 |
| 2323 | GATATGGGGCCCAGGATGAC | 2773 |
| 2324 | GCACGTGGCCTCGTAGCCCA | 2774 |
| 2325 | TAGCCAGGAGCACGATCTGT | 2775 |
| 2326 | TCCACCGACCACCTCCAGCC | 2776 |
| 2327 | TATCTAAGCCCGGTAGCCAC | 2777 |
| 2328 | AAAGAGCCTAAGGGTGAAAA | 2778 |
| 2329 | TGTGCAGTCGAACAGCATGA | 2779 |
| 2330 | CGTCTACAAGTGAGCGGCCC | 2780 |
| 2331 | AGCCCTACTGCACCAGGGCC | 2781 |
| 2332 | TAGGCCCTAGGGTGGCTCTG | 2782 |
| 2333 | CAGCGTGAAGGCTACTGCTC | 2783 |
| 2334 | CCTGAGCCACCTGGTGCTGC | 2784 |
| 2335 | CGTGATTTCCCTGGAGACGC | 2785 |
| 2336 | ATCCATGCCCGTCAGGTAGT | 2786 |
| 2337 | GTTTCATGCCTGCTCATGGC | 2787 |
| 2338 | TGCGCTAGACCAGGGGGTTC | 2788 |
| 2339 | GAGTTAGGTGCCAAAACTTG | 2789 |
| 2340 | CGTAGTGACCAAGGTCCAGT | 2790 |
| 2341 | TCTAGCTCTCAGCCTGCTAC | 2791 |
| 2342 | TCGCTAAAGACCTATTTCTA | 2792 |
| 2343 | CACTCAGAACCTTAGGCATT | 2793 |
| 2344 | CCTGATGCTGCTGGACGGAC | 2794 |
| 2345 | AGCCTAGGCCAGGAGACCTA | 2795 |
| 2346 | GAGAGTAGGCAAATGACCTG | 2796 |
| 2347 | CGTAGTCCTCGTGGTGACCA | 2797 |
| 2348 | CCAGCCTAGGTGAACATGTA | 2798 |
| 2349 | TTCATAGACGGCCACCTAGA | 2799 |
| 2350 | AGCTTCTATGTGTCCTCTTT | 2800 |
| 2351 | GAGGCTCACTCCTCTGTGAT | 2801 |
| 2352 | CCTGATCTGCAAGGAATGCC | 2802 |
| 2353 | CCTAGGGGGAGGACGAGGAG | 2803 |
| 2354 | CGGAATGCTGAGCGGTGTGG | 2804 |
| 2355 | CTTCCCTATCTCTACAGCCC | 2805 |
| 2356 | GTCCAGTCCCCAGGAGGAAA | 2806 |
| 2357 | CAGCCACCAGTCATAGGGGG | 2807 |
| 2358 | TGGTGTTAGGTAAATCCGGG | 2808 |
| 2359 | CTCCAGAGTGCATAAATCAG | 2809 |
| 2360 | AGGTTAGCCGTCAGCACCCT | 2810 |
| 2361 | TGAGGCTGCGCGGGCCCTTG | 2811 |
| 2362 | GATCTAGGCATCAATAATCA | 2812 |
| 2363 | ACGGGCCCAGGGGCGCGGAC | 2813 |
| 2364 | AAAGTGTAGATCTATCCCGA | 2814 |
| 2365 | CAGATGCTGGGAGTCCTGCC | 2815 |
| 2366 | CTCTCAGCTCTGCCTTGGTC | 2816 |
| 2367 | TGACCTCACCTGGGTGTTCG | 2817 |
| 2368 | GGCCTATTCCACCTGTCCCC | 2818 |
| 2369 | GTATCAGACAGATGAAGTAG | 2819 |
| 2370 | GGAGCACCTGGCCAAGCTGC | 2820 |
| 2371 | CGCTCGTACTCCGTGCCCGA | 2821 |
| 2372 | CTCACTTGCCGGCCTTGATC | 2822 |
| 2373 | TGGCTCCAGTATCGTCAACA | 2823 |
| 2374 | CCCAGACCTGCCAGGCTGCA | 2824 |
| 2375 | AAGGCCCAGCTCAACAGTCA | 2825 |
| 2376 | ACTAGTCCTATTGGTCCTCC | 2826 |
| 2377 | GGATCCGCACGGGCCGGGTC | 2827 |
| 2378 | CTGGCAGCAGGTATCACACA | 2828 |
| 2379 | CCGGGACGACCCCGGCTTTG | 2829 |
| 2380 | AGCTGACCCGCAGGGTGATC | 2830 |
| 2381 | ACTTTACAGATCAGAGGTGG | 2831 |
| 2382 | CCTGACTGGACAGCCACCAC | 2832 |
| 2383 | AAGAGGCATCCATTTCAGGT | 2833 |
| 2384 | CATAGTGAGTTTGGTCTCCC | 2834 |
| 2385 | CAGAGCTAACACAGTCTGAA | 2835 |
| 2386 | AGCATGAGCTCTGCCTTCTC | 2836 |
| 2387 | CAACCACCGGGACGTACGGC | 2837 |
| 2388 | AATGCAGTCCCCAAGGAGGT | 2838 |
| 2389 | TGTTTAGCTGGAAACAGACC | 2839 |
| 2390 | CTCTGCAGGAAAAATGGTGG | 2840 |
| 2391 | AATGAGGAAGCTGGATCTGC | 2841 |
| 2392 | TCCTCAGTCTTCCTCATTCA | 2842 |
| 2393 | GGCCGGTCAGTCAGTCTTAC | 2843 |
| 2394 | GGTAGGCTAGCTCGCCGCTT | 2844 |
| 2395 | GGCTACTGCTGCTGCGGCGG | 2845 |
| 2396 | AAACAAGGGGATGCCTGTGA | 2846 |
| 2397 | GTGACCATGGCCTGCGAGGA | 2847 |
| 2398 | GTCTCAGGCGTCCCTCCAAG | 2848 |
| 2399 | CGACTGTGCGTGGCGAGCAG | 2849 |
| 2400 | CGAGGGCTGTGGACGCCCTG | 2850 |
| 2401 | GGCCTTCTGAGCAGAATGGA | 2851 |
| 2402 | CCAGATCCCATTGGACCACC | 2852 |
| 2403 | CATTGGCCTATTCCCGGCGC | 2853 |
| 2404 | CCGCGTCAGGTGCCAGCACA | 2854 |
| 2405 | CAGCTAGGCAGCCACGTAGA | 2855 |
| 2406 | ATGTGATGATGTCCACCGCG | 2856 |
| 2407 | AGTCATCTCTCTGTGCAGTT | 2857 |
| 2408 | GTCTCATCCAGGGGAACCTT | 2858 |
| 2409 | GCGTAGGAGCAGTCAAGAGA | 2859 |
| 2410 | AGACTAATGCCTCATTTGTT | 2860 |
| 2411 | AGAGATGGAGCTGGTCCCCC | 2861 |
| 2412 | GGCTAACCCATCTCTCCTCG | 2862 |
| 2413 | AACGATCTCAGTGGAGAACG | 2863 |
| 2414 | CCCTCAGGGCAGGCTGAGCG | 2864 |
| 2415 | GCCTGCCCATCTGCTGAACC | 2865 |
| 2416 | CAATCATTGGGCAGGTGGAG | 2866 |
| 2417 | CCTAGAAAGCCAGGCCTCCC | 2867 |
| 2418 | GCACTACTTGGCAACCTCCT | 2868 |
| 2419 | AAGGCTAGTGGAGACCTGGG | 2869 |
| 2420 | AGATTCATTGGTGCCGAGGG | 2870 |
| 2421 | GGCAACGGCGGCAGTGGGCG | 2871 |
| 2422 | CTTTGACCGGTAAGTAGGAG | 2872 |
| 2423 | CCTCACAGGCCACGCTCTCC | 2873 |
| 2424 | CAAGAAATGCCTGGAGAAAG | 2874 |
| 2425 | CCTAACTAACACTGGATCCC | 2875 |
| 2426 | TCTTTATCTTCCTCCAGTGC | 2876 |
| 2427 | GCCAGCCCTCCTGGGGCCCG | 2877 |
| 2428 | TGGCAGGCAGCGGCAGTTGT | 2878 |
| 2429 | AACGATGATAAAGGTCATGC | 2879 |
| 2430 | CATGTCTATCAAGTCAGAAC | 2880 |
| 2431 | GGACTAGATTCTCAGAGCTC | 2881 |
| 2432 | ATTCAGCGGGGCACGACAAA | 2882 |
| 2433 | CCTCCAAGTGTAAGCGGTGG | 2883 |
| 2434 | GACGCACTGCAGCTCGGCCT | 2884 |
| 2435 | AAGCCACCTTGTTGTTAGGA | 2885 |
| 2436 | AAGTTCAACTCTGGTTTAAA | 2886 |
| 2437 | CCTAGCCCTCTGCCAGATTT | 2887 |
| 2438 | GAGCATTCCTCCTTGTTATC | 2888 |
| 2439 | AGGGCCTCTACAGTGGCGTA | 2889 |
| 2440 | CCTGATCCTGTCGGTCCAGC | 2890 |
| 2441 | GCAGCTGCAGGCTGCGCACC | 2891 |
| 2442 | GCTAGGGGCTGAAGTCCCTC | 2892 |
| 2443 | GAGCTAGAAGATCCTCGCCA | 2893 |
| 2444 | AGAGCATTTCTTGAATCCAG | 2894 |
| 2445 | GGCCCAGACCCCATAGCCAA | 2895 |
| 2446 | GGGACAGCCGCCTGACCAGC | 2896 |
| 2447 | AGACATACCTCTTGTCCTTG | 2897 |
| 2448 | CAGGCGAGCAGCATGGTGTC | 2898 |
| 2449 | TGACACCCACAACATGTCAG | 2899 |
| 2450 | AAGTGTTAAAGAGGCTTTGC | 2900 |
| 2451 | GGCCTGAGTGCGGGCGCGGG | 2901 |
| 2452 | GCGGCTATGCTGGGAGCATG | 2902 |
| 2453 | GCTGATCCTGCTGGTCCTGC | 2903 |
| 2454 | CCACATATTTGTGCTGGAGC | 2904 |
| 2455 | CCCCCAGAGAGAGAGTGGTG | 2905 |
| 2456 | GAGGTATGTCTCCAGCAGGT | 2906 |
| 2457 | CAAGATGCGTGCTCTGGAGG | 2907 |
| 2458 | TGCGAACTTTTCACCACCAT | 2908 |
| 2459 | GCTAGTGCTCCCGGTCCTGC | 2909 |
| 2460 | TGGTAGCTGGACAACAAAAA | 2910 |
| 2461 | CCATCAGTGACGGCCTGGGT | 2911 |
| 2462 | GTCTCATGCCTGCTCGTGGT | 2912 |
| 2463 | GGCTTCATGCCCATGTATGT | 2913 |
| 2464 | CTCACGGCCCTGGCAGTCCT | 2914 |
| 2465 | CTGGCTAGAGGCGAGGCTTC | 2915 |
| 2466 | GATGATCCCCCAGGTCGCGA | 2916 |
| 2467 | CCTCAGGGGCCAACAGGTCC | 2917 |
| 2468 | CGGCTACAGATGCCATTGAG | 2918 |
| 2469 | GAAATGGTTCTCCTTGCTTG | 2919 |
| 2470 | GTACCTTCAGCTTGGAAGTC | 2920 |
| 2471 | GCTGCAGGTCCCCCCGGCCC | 2921 |
| 2472 | CATGATGATCAAGGTGCTCC | 2922 |
| 2473 | CCCTGACCCTCAGGGTGTCA | 2923 |
| 2474 | GCCTATCTCCTGGGTTCCCG | 2924 |
| 2475 | ATGGAGAGATTGATCCTAAA | 2925 |
| 2476 | AGTCTAGGAGAATTTACTAC | 2926 |
| 2477 | ATCCCTTAAAAAGCATTTCC | 2927 |
| 2478 | CGCAGTCCCCCAGGTGAGAG | 2928 |
| 2479 | GTCTCATGCCTGCTTGTGGT | 2929 |
| 2480 | TGGGCTATTGGGGGCCCAGA | 2930 |
| 2481 | TGGCTATGCCACCAGTAGCA | 2931 |
| 2482 | CCTGGTGACTGTGCGTTCTG | 2932 |
| 2483 | CACCACCGTGCTGGGCAATC | 2933 |
| 2484 | TATCTAGCGGAAGGCCTCTG | 2934 |
| 2485 | AAGAGACGAGCCAGCGCAAG | 2935 |
| 2486 | CCTGAACCTCCTGGTGCCCC | 2936 |
| 2487 | AATGATGCTCCTGGACTGCG | 2937 |
| 2488 | TGAACCTACTCCACGCCCAC | 2938 |
| 2489 | CCTGCTAGTCCTAGGGTAGG | 2939 |
| 2490 | TTCAGGAGCTTCAGTTGTTC | 2940 |
| 2491 | CTGCTATCTGCTTGCATTCG | 2941 |
| 2492 | TCCTACCGCTCACTCGGCAG | 2942 |
| 2493 | CTGACTCCAGCTGTCGTCAC | 2943 |
| 2494 | CCTGAAAAGCCTGGTATTCC | 2944 |
| 2495 | ACCTGATCCTCATGGCCCCG | 2945 |
| 2496 | GATCACCTCTCAGAGTCCTC | 2946 |
| 2497 | ACTCCATGACAGTGTAATTT | 2947 |
| 2498 | CTGCTAGTCCAGGGGGCTGG | 2948 |
| 2499 | CTGCCAGACTGCATCCAGGC | 2949 |
| 2500 | TCTAGGAGCCTCTGTTTACT | 2950 |
| 2501 | GTGTTCCAACCTGAGAATGC | 2951 |
| 2502 | CGAGATATGATGAAGGAGAT | 2952 |
| 2503 | ACAAGCCCCGTTGGAGCTGC | 2953 |
| 2504 | GTCCCAGAAGGAGGCCCAGC | 2954 |
| 2505 | GGCCTCGAGTCAGTTCGAGT | 2955 |
| 2506 | CCAAAGGCTACATTTCATGA | 2956 |
| 2507 | TTATCCGGGAGCCCCCTGTA | 2957 |
| 2508 | TTAAGGAGCACTGGAACCGG | 2958 |
| 2509 | CTACAGTCCCCTCATCCAGC | 2959 |
| 2510 | CGGCGTTGCACTGGCACACT | 2960 |
| 2511 | CGGGCACATTGTGGAGGGCT | 2961 |
| 2512 | TGACGTCGTGGTGAGCAGCT | 2962 |
| 2513 | GATTCCCAGTTATGTCCAAT | 2963 |
| 2514 | TGGTGGGAACATCTGGTGGA | 2964 |
| 2515 | TTCATCCAAGTAATGGCATC | 2965 |
| 2516 | GCGGGGAGTGGCTGGGGGAC | 2966 |
| 2517 | GATGAACGCGATGTAGCTAT | 2967 |
| 2518 | AGAAGGGCTCCGGGTGAGAA | 2968 |
| 2519 | CTAGCTGGACTCCGGACCTG | 2969 |
| 2520 | AGAGGGGGCTGCAGGGCCAG | 2970 |
| 2521 | GCTCGCCCACCTGCTGGCCC | 2971 |
| 2522 | AAGGATTAGCCCCACAGATG | 2972 |
| 2523 | CAAGGACAACACTGATCGCC | 2973 |
| 2524 | AAGTAGATGCTGCTGTCAGA | 2974 |
| 2525 | TCCCACTAGATCTCCTTCCT | 2975 |
| 2526 | GCATTCTCCAGGAAAGCCGA | 2976 |
| 2527 | TTCTGCCAATGTGAAATTAA | 2977 |
| 2528 | GGCAAGGGTCTTCTACATGT | 2978 |
| 2529 | CGCCAGGTATTTCGGGGTGC | 2979 |
| 2530 | AGCTGAACATGGTGCAGAAC | 2980 |
| 2531 | GGGCTACAAGTCACCACCGT | 2981 |
| 2532 | GAGCTGTCACACATCCAGAT | 2982 |
| 2533 | TCCAGTCAGTAAAGAGTAGA | 2983 |
| 2534 | ACAGAGCTAGCCGCCCCAGT | 2984 |
| 2535 | GCCCCGCCATTCTCCACGAT | 2985 |
| 2536 | ATGAGGCCTCCAGGGCTTCC | 2986 |
| 2537 | AAGGACGACCGTGGAGACCC | 2987 |
| 2538 | GCATGTCCCAAAATATATTT | 2988 |
| 2539 | GTTACGTGACAAAATTCTGC | 2989 |
| 2540 | TGACCGACTACAGCAGGTGC | 2990 |
| 2541 | CCTTGGGCATGGTGTGCGGG | 2991 |
| 2542 | GTCTCTGTAGATGATTGACT | 2992 |
| 2543 | GAAGAGTACAGAAAGAGAGA | 2993 |
| 2544 | GGGTAAGGGCATGACGCTGA | 2994 |
| 2545 | GCGTCCAGCCCTGCACGTTC | 2995 |
| 2546 | CGAGCCGCCCAGCGAGCTCA | 2996 |
| 2547 | GTTGAAGAAGCACTTGATCT | 2997 |
| 2548 | CTAGCTGGGACTGAGAGACC | 2998 |
| 2549 | AAAAGAGAGCCGTGGGGAGA | 2999 |
| 2550 | CTCTTTCAGCCCAGGCCCTC | 3000 |
| 2551 | CGGGATAATGACGGTGCTCG | 3001 |
| 2552 | GGTTCCACTAGTAGTGCTGG | 3002 |
| 2553 | GTTTCCTCAGACAGCAGGTG | 3003 |
| 2554 | CCTTACATGCCCTGGTAAGT | 3004 |
| 2555 | GGCCAGCTAGTCGCGTTCGG | 3005 |
| 2556 | CGCTTCCTGATGCTGGGCCC | 3006 |
| 2557 | CCTCAATTCTAGAAAGGCAG | 3007 |
| 2558 | CCGGGAGCACACGGAGGAGC | 3008 |
| 2559 | CCTGACATGATACTGCTTCC | 3009 |
| 2560 | CTACTCCCACAACAAGGCTC | 3010 |
| 2561 | CTCAAGGACCCTCTTGTCCG | 3011 |
| 2562 | ATCAGCCTTTACCAACTTGC | 3012 |
| 2563 | CCTGAAGCCCCCGGACCACC | 3013 |
| 2564 | GTATTTACTGAGTTCCCCAC | 3014 |
| 2565 | TGCATGCTAGCTGCACATAT | 3015 |
| 2566 | GGAGGGCAAGGAGTGCAGGT | 3016 |
| 2567 | TCCAATATGCTGAGAGGCAT | 3017 |
| 2568 | CAGCAAGGTGGCCACACAGA | 3018 |
| 2569 | GTAAGTGCAGTTGGTCCCCC | 3019 |
| 2570 | ATCACTGTTCAATTTCCTGT | 3020 |
| 2571 | GGAAGTGCACACCTGACAGG | 3021 |
| 2572 | CAAAGTCCTCCTGGTCCCAG | 3022 |
| 2573 | TCCAAGAGGCAAATTTCCAG | 3023 |
| 2574 | ACTGACACCCTATATCCCCA | 3024 |
| 2575 | CGATGCACTACAGCAGGGCC | 3025 |
| 2576 | CTCAATAGGCACGAGCAGAC | 3026 |
| 2577 | GTGCAACATGGCTCGCATTG | 3027 |
| 2578 | CGGGTACAGGAGGGCTCTGG | 3028 |
| 2579 | GATCCTCACCAGGGAGGAGG | 3029 |
| 2580 | CAGCAGCCTAGATCATTGCC | 3030 |
| 2581 | GCAGGCCTCCGGAATCACCC | 3031 |
| 2582 | GGACTGCAAAACCAAACCAA | 3032 |
| 2583 | CTCAAGGCCGCCGTCTGCGC | 3033 |
| 2584 | CCCACCTCATGATCGTTCTG | 3034 |
| 2585 | ATGTCTAAGTGAGTAGGCAT | 3035 |
| 2586 | ATTGCTTTTACCTAGTGCTA | 3036 |
| 2587 | CTGGCTTCTAGGTTTCTGCT | 3037 |
| 2588 | CAAGCGGGACAAGGCCCACG | 3038 |
| 2589 | GGAGGGCTAGCCGGCCGGCC | 3039 |
| 2590 | CAGCAGCACCTTCTGTGAGC | 3040 |
| 2591 | CCTCAAGGCCTGGGTGCTGC | 3041 |
| 2592 | TACGCCTCCAGCAGGACCAC | 3042 |
| 2593 | TGGGAAGCTAGAGCCACACC | 3043 |
| 2594 | TCTTTCCCACACGGCCGTCC | 3044 |
| 2595 | TGCAGGTTAGTTCCTGTCCC | 3045 |
| 2596 | TTCTAGAATGATGACGGTGA | 3046 |
| 2597 | TCTCAGCGTTTATCACTGTC | 3047 |
| 2598 | AGCTACAGAGAGCTGGGCTG | 3048 |
| 2599 | GATCTCCAGCTGTGCAAACT | 3049 |
| 2600 | ACGACCAGGTATGGTGCGGC | 3050 |
| 2601 | CCACATACTGTCCGAGCTGG | 3051 |
| 2602 | AACAGCATCTGGGAAAGTAG | 3052 |
| 2603 | CCATTGGAAACAGCGCATGG | 3053 |
| 2604 | CGAAGCGGCCCCGGGCGCGA | 3054 |
| 2605 | AGAGAAGCCCCTGGATGGCC | 3055 |
| 2606 | ATTAGAAGAGTAGGAAGATT | 3056 |
| 2607 | CTCTTCCTCATATCTCCACA | 3057 |
| 2608 | CTACTTGTTGTCCCGGTAGA | 3058 |
| 2609 | TTCCACAGAGCATGTCTCAG | 3059 |
| 2610 | GTGACCACTGATCGGAAACG | 3060 |
| 2611 | ACTATAGCACAGCTTTATCC | 3061 |
| 2612 | AGACACCATGAAAGCTGCCA | 3062 |
| 2613 | CGGCCAGATGACCATCCAAT | 3063 |
| 2614 | AAAGCTGAAAAGGGACGAAC | 3064 |
| 2615 | AAGTTAGCAAACCAGGAGAA | 3065 |
| 2616 | CCAAGGCCTGATGGTGAACC | 3066 |
| 2617 | CAGCTACAGCTCCCTGCCAT | 3067 |
| 2618 | ATAAAAGAAGGCCAGGACAT | 3068 |
| 2619 | CTCAGGAATCAGATGCACCA | 3069 |
| 2620 | TCACCTCTTGGCAGCTCTTT | 3070 |
| 2621 | AACAGCCAGCTGGGGTAGAA | 3071 |
| 2622 | GTCACTGGTTCTCGTGGTCC | 3072 |
| 2623 | ATAATCCTAGTTTACTTCAG | 3073 |
| 2624 | CGCAGATCTGATACTCAAAG | 3074 |
| 2625 | GCTACCAGAAATGCCGAGCC | 3075 |
| 2626 | GCGTGAGCTACGGGTCCCAC | 3076 |
| 2627 | AATCTGATTCCAGAACAGGA | 3077 |
| 2628 | GGACCCCCTGGCCGACTACC | 3078 |
| 2629 | TGGAAGCCCTGAGGGTGGAG | 3079 |
| 2630 | GATGGCATTTCAAGACTGGT | 3080 |
| 2631 | AATCCCTGTAAAGATATTAT | 3081 |
| 2632 | AGGGCAAGGAGTGCAGGTGA | 3082 |
| 2633 | CAGTGGATACATCTCGGGCA | 3083 |
| 2634 | CCTTGGCTCACTTCAGCAGC | 3084 |
| 2635 | CACAACATGCCCATTTATGA | 3085 |
| 2636 | GCTAGTGAAGTTGGCAAACC | 3086 |
| 2637 | CCCTTCCCAATTGTCTGGAA | 3087 |
| 2638 | TGACTATAAATGGAGTGAGA | 3088 |
| 2639 | CTGAGTTCTCCATGAGTGTT | 3089 |
| 2640 | AGGCAGAAGACTCTGGGTCT | 3090 |
| 2641 | CGAGTGGTGCCGCACGAAGC | 3091 |
| 2642 | CTGACTGAAGTGGACGGACA | 3092 |
| 2643 | GGATGAACAGGGCCCAGCAC | 3093 |
| 2644 | ACTGAAGCACGGGGTCTTGC | 3094 |
| 2645 | ATCAGCCCCGCTGGAAAAGA | 3095 |
| 2646 | AGAAGCCACACAATATCAAG | 3096 |
| 2647 | GTACGCTCTTGAGGTTGTAA | 3097 |
| 2648 | CCACCTTCATGCCAATGTCA | 3098 |
| 2649 | GCTTGGCCAACTTCCCAAAC | 3099 |
| 2650 | ACTCAGAGTTGCCGTATTCG | 3100 |
| 2651 | CTGTCTTTTAGAACAGGATG | 3101 |
| 2652 | CGTCGAGCTTCTGCTTCTCC | 3102 |
| 2653 | TCTTCAAGATATCAAAGAAC | 3103 |
| 2654 | GGGCTAGAGCATCTTTGAGC | 3104 |
| 2655 | CGAGGGGGCCCCTCTCCCCA | 3105 |
| 2656 | GGCTCACAGGGCACAGAGCA | 3106 |
| 2657 | CCACTGGGGCCCCCGAGACC | 3107 |
| 2658 | CCAAGGCCTCGAGGTAACAG | 3108 |
| 2659 | AAAAGTGAACAGGGTCCCCC | 3109 |
| 2660 | TGGTGTTGGATAAATCCGGG | 3110 |
| 2661 | CAGCTCAGTTCGTGGACGCC | 3111 |
| 2662 | TTCACTCCTAGAAGTTCTTC | 3112 |
| 2663 | AGCATGGATGGGATGTGCTG | 3113 |
| 2664 | GATAGGGAGTTGCCAGGAGA | 3114 |
| 2665 | CGAGAACCTGCTGGACCAAA | 3115 |
| 2666 | GGACTTGGCAGCTGCGCGGC | 3116 |
| 2667 | GGTCTTGCTAGTGCTCGGGT | 3117 |
| 2668 | CAGCACCATGACCCAGGTGA | 3118 |
| 2669 | AGAAGCACATGGCTTCATAA | 3119 |
| 2670 | CTCAAGGTCCAGGTTAAATC | 3120 |
| 2671 | CCGTGCTGAGGCTGTTCGTG | 3121 |
| 2672 | GGCTGTCATCACCAATCCCA | 3122 |
| 2673 | GAGAGCAGTCATCTTTCCCC | 3123 |
| 2674 | GCCAAGACCCACTTCAAAGA | 3124 |
| 2675 | AAAGATGAAACAGGTGAACG | 3125 |
| 2676 | TTCACCCTGAGAGACCTCTC | 3126 |
| 2677 | CCCAGAAAAGATGGTGTTCC | 3127 |
| 2678 | GGGCATCCTAGGGAATGTCC | 3128 |
| 2679 | CGCACAAGGAGCTCTACAAG | 3129 |
| 2680 | GCTACACCCAGGGCGCTAGC | 3130 |
| 2681 | TCTACAGCTCTGGGAGGCTC | 3131 |
| 2682 | GTATGGCAAAGGTGCCCTTG | 3132 |
| 2683 | CTGGCAGAAGGCCTCTGTGG | 3133 |
| 2684 | GCTAGGGGTGGTGGCTGTTG | 3134 |
| 2685 | GATCCGGTTCTGGCTCCAGT | 3135 |
| 2686 | ACAGGGCCTTAGTGTATCAC | 3136 |
| 2687 | CAGGATGACCCAGGACTTAA | 3137 |
| 2688 | AGTGCTCCAGTTTACCTAAA | 3138 |
| 2689 | CTGGGAGATGATGCTGATCC | 3139 |
| 2690 | ACCTACACCCTAGCCAAGTG | 3140 |
| 2691 | TGACTAGAAGGACGTCCTGT | 3141 |
| 2692 | CAGAGTGGTAGGAGTGTGGA | 3142 |
| 2693 | CATCCAGTAGATCAAGGAGA | 3143 |
| 2694 | ACTGAATCACCAGGAATTCC | 3144 |
| 2695 | ATCAAGTCTCCGCTGATACC | 3145 |
| 2696 | TAATAACTCAAGCAACCTTC | 3146 |
| 2697 | AGCACTTGATGTGCTTGGCT | 3147 |
| 2698 | GCGCTAGTGGTACGGGGAGA | 3148 |
| 2699 | CACTAGTGGTTGACGAACTC | 3149 |
| 2700 | GATGGACTACTTCAGGCGTG | 3150 |
| 2701 | AACTGCTAGATGCCGTTCAA | 3151 |
| 2702 | GTGAAGTGTCTATCTTTCAT | 3152 |
| 2703 | CACATGGAGAAGATCTTCTC | 3153 |
| 2704 | AGCTGTCTAACAGTTGGCCT | 3154 |
| 2705 | GAGCTAGATCCGGTCCATCA | 3155 |
| 2706 | GGTTCTAATTTGGAATAGGC | 3156 |
| 2707 | CGGAAGGTCTAAGAGATGGT | 3157 |
| 2708 | GTCTAAAGAACACCCCCAGG | 3158 |
| 2709 | GAAGCTAGCGAGTCAGTAAC | 3159 |
| 2710 | CCCAGACTCTACCATTTTTC | 3160 |
| 2711 | GAAACTAGGTGAGGCCGCCA | 3161 |
| 2712 | AAGCAAAGAGAGGCCCTAAT | 3162 |
| 2713 | AGACGAAGTACAACTGAAGG | 3163 |
| 2714 | TCTAAGTGTTGGGTCCGTCC | 3164 |
| 2715 | AATGACTATGCCTACCTCAA | 3165 |
| 2716 | CCTGAACGAGAGCTTTGGCT | 3166 |
| 2717 | CCTAGAGGGAGACGGTGCGC | 3167 |
| 2718 | GGCTAAAAACGGGGTCTCTG | 3168 |
| 2719 | GGACTAGTGAATGCTTCCTG | 3169 |
| 2720 | ACAGAGCTAGCTAACGATCT | 3170 |
| 2721 | CTTGAACTAGCGGTCCCCAT | 3171 |
| 2722 | AGCACTATGCCTTAACAGAT | 3172 |
| 2723 | GTCCCCAAAACCGTTGTTGC | 3173 |
| 2724 | GAAGACTGCAGGTCAGCCCT | 3174 |
| 2725 | TCTCCCCCTTCTCCCTGAAA | 3175 |
| 2726 | GACCCCTGCCAGCGTCATGG | 3176 |
| 2727 | GCACTGCTAAGCGCCAGCCT | 3177 |
| 2728 | AAAGAACTCTGAATTAGGTA | 3178 |
| 2729 | GACCTGCTAGAGGAAGTCGA | 3179 |
| 2730 | GAACTAATGCGCCCTGTTCA | 3180 |
| 2731 | GAGGCACATATAGGTCTTGA | 3181 |
| 2732 | GGGAAGCTAGGCCAAAGTGC | 3182 |
| 2733 | TCCCTAGGTGAAGATGGAAA | 3183 |
| 2734 | GCCCCAACATAGTAATTCCT | 3184 |
| 2735 | CTCTGAGCTAGTTGATCTCG | 3185 |
| 2736 | GTAGTACTATACGCCATGGC | 3186 |
| 2737 | ACAGTGCTAAGAGGAGGACC | 3187 |
| 2738 | CTGAAGCTGAAGTAGAGCGC | 3188 |
| 2739 | CACGTCTAAAGAACACCCCC | 3189 |
| 2740 | GGTTACCCTACTTGGAGAGC | 3190 |
| 2741 | ATTCACTCTAAAGCTGGAAA | 3191 |
| 2742 | AGCCAGCTACATGTAGGGGT | 3192 |
| 2743 | GCTCTAAGTGCCATTGCCGT | 3193 |
| 2744 | GCGTACTTCTAACAGGTCAG | 3194 |
| 2745 | GCTGGGGATCTAGGGGCCGG | 3195 |
| 2746 | GCCGCTGTGGTGCACCACGC | 3196 |
| 2747 | CTCTAGGGCATGGGGTGGCT | 3197 |
| 2748 | GGAAGGTCTAAGAGATGGTA | 3198 |
| 2749 | GAGGACGACGACGTCACCAA | 3199 |

[0639] As a companion to the above Table 5, the following Table 6 indicates which indexed sgRNAs were identified per each base editor tested in Example 1:

TABLE 6

| | sgRNA (numerals correspond to the Index No. from the |
|---|---|
| Base Editor - amino acid | above Table - ranges are inclusive. Data at sgRNAs at |
| sequences are provided | indexes 1-2,695 are from SpCas9, while data at sgRNAs at |
| herein and indicated below | indexes 2,696-2,749 are from Cas9-NG) |
| ABE | 880-2498 |
| SEQ ID NO: 3210 | |
| ABE-CP1041 | 880-990, 998-1014, 1042-1313, 1749-2184, 2186-2695 |
| SEQ ID NO: 3211 | |
| AID-BE4 | 1-301 |
| SEQ ID NO: 3202 | |
| BE4 | 2-3, 6-12, 16-17, 19-27, 40-42, 44, 47-48, 52-53, 55-58, 62- |
| SEQ ID NO: 3200 | 65, 68, 70, 74-78, 80, 82-92, 94-98, 198, 200-204, 207, 210- |
| | 211, 213-219, 222-224, 226-229, 231-233, 235- |
| | 236, 238, 244, 247-248, 252-255, 257-258, 260, 263-270, 272- |
| | 275, 279, 281-287, 289-290, 293-294, 296, 298- |
| | 299, 301, 541, 543-626, 628-712, 722-723, 798-838, 840-848, 858-878 |
| BE4-CP1028 | 2-3, 5-9, 11-15, 17-27, 40, 42, 44, 47-50, 52-54, 56-58, 63, 65, 74- |
| SEQ ID NO: 3208 | 75, 77, 79-83, 85, 87-93, 96-98, 157, 162, 182, 263, 302, 305, 308, 313, |
| | 315, 324, 336, 338, 341, 343, 345, 403, 407-411, 413, 415- |
| | 416, 418-419, 421, 423-427, 429-440, 461-464, 467-468, 470- |
| | 471, 473, 508-514, 516-520, 522-524, 526-535, 537, 539- |
| | 540, 544, 586, 588-590, 592-605, 607, 621, 624, 632, 702- |
| | 703, 705-708, 710-712, 723, 799-801, 803-804, 807- |
| | 808, 810, 813-816, 818-828, 830-835, 837-838, 840-848, 858- |
| | 860, 864-873, 876-878 |
| CDA-BE4 | 4, 6-7, 9-13, 15-17, 20-24, 26, 31-32, 35, 40-41, 44, 47-50, 52- |
| SEQ ID NO: 3203 | 53, 55, 63-65, 68, 70-72, 75-81, 84-87, 89-94, 98, 100-101, 103- |
| | 104, 107, 109, 111, 113, 118-121, 124-127, 130-132, 136, 141- |
| | 144, 146-148, 151-160, 162, 164, 166-167,170, 172-173, 175- |
| | 180, 184, 195, 198, 200-204, 206-215, 218-219, 221-224, 226- |
| | 227, 230, 233-234, 237, 239, 243-244, 247, 251-257, 261- |
| | 267, 274, 281-284, 286-287, 289-290, 292, 295, 297- |
| | 302, 304, 411-412, 414, 417, 420, 422- |
| | 423, 425, 428, 431, 433, 435, 438, 442-445, 457, 463, 472, 477- |
| | 479, 485, 488, 491, 493- |
| | 494, 507, 510, 513, 515, 518, 521, 536, 538, 540, 542, 552, 561, |
| | 563-569, 573-582, 587-588, 591, 593-595, 598, 622- |
| | 623, 625, 627, 640, 667, 704, 712-721, 724-727, 734- |
| | 752, 755, 759, 761-768, 773-774, 776, 780, 785-786, 788- |
| | 789, 795-797, 800, 802, 805-806, 811-812, 814, 817- |
| | 818, 820, 829, 831, 833, 835, 839- |
| | 842, 849, 852, 854, 856, 861, 864, 874-875, 878-879 |
| eA3A-BE4 | 2-3, 6, 8-10, 13, 15-17, 20, 22-23, 25, 27-28, 32, 35, 42, |
| SEQ ID NO: 3205 | 45-47, 53, 55-56, 63-64, 74, 76, 80-81, 86-92, 96- |
| | 98, 111, 119, 121, 127, 151, 154, 156, 159- |
| | 160, 171, 178, 180, 184, 192, 198, 204-206, 210-211, 214, 216- |
| | 217, 220, 224, 228-229, 231-233, 235, 244, 247, 252- |
| | 253, 260, 263-268, 270, 272-274, 276, 279, 281-285, 287- |
| | 289, 293-294, 296, 298, 303-304, 306-312, 314, 316-317, 319- |
| | 323, 326-329, 331-337, 339, 343-345, 347-348, 352-362, 364- |
| | 372, 374-406, 410-411, 432-434, 438, 446-447, 449- |
| | 453, 456, 458, 460, 466, 468-469, 474-476, 481, 486, 489- |
| | 490, 492, 495-506, 521, 523, 525, 539, 543-551, 553-556, 558- |
| | 564, 569, 573, 575, 578-579, 581, 583-584, 588, 590, 593, 595- |
| | 596, 598-600, 602, 604, 607, 614-620, 622, 624, 626, 628- |
| | 630, 632-639, 641-647, 651, 657, 660, 662-663, 665-666, 668- |
| | 671, 673-674, 678, 686-689, 691-693, 695-700, 702-703, 707- |
| | 709, 711-712, 715, 723, 741, 800-806, 808, 811, 813-821, 823- |
| | 827, 829-830, 832-833, 835, 844, 846-849, 852, 858-860, 865- |
| | 866, 868-870, 872-874, 878, 2696-2737 |
| eA3A_T31AT44A | 2725-2726, 2738-2749 |
| evoAPOBEC1-BE4max | 1-4, 6-7, 9-11, 13, 15-18, 20, 22-27, 32, 35, 40-42, 44, 47-49, |
| SEQ ID NO: 3204 | 51-53, 55-56, 58, 61-63, 68, 70-72, 74, 76-82, 84-92, 94- |
| | 98, 100, 104, 108, 111, 116, 121, 125-126, 131, 136, 141-143, |
| | 146-148, 150-151, 153, 155-160, 162, 170, 172, 175, 178-180, |
| | 183-184, 190, 195, 198, 200-201, 203-204, 206, 210- |
| | 212, 214, 217, 220-221, 223-227, 229, 231-233, 235- |
| | 239, 244, 247, 249, 252-258, 263-270, 272-274, 276, 278- |
| | 279, 281-284, 286-290, 293-294, 296, 298, 300- |
| | 301, 304, 318, 321, 324-325, 330-333, 338, 340, 342, 346, |
| | 349-351, 358, 363, 373, 379-380, 385- |
| | 389, 411, 423, 425, 427, 431, 433, 438, 441, 445, 448, 454- |
| | 455, 459, 463, 465, 472, 476, 480, 482-484, 487, 491, 493- |
| | 494, 503, 510, 514, 517, 521, 535, 540, 542, 544-545, 551- |
| | 555, 558-564, 567-568, 573-576, 579-582, 588-589, 593, 595- |
| | 596, 598, 600, 603, 605, 610, 612-617, 620, 622, 625- |
| | 626, 628, 630-631, 635-641, 644, 651, 653-654, 656, 676, 678- |
| | 679, 682, 688, 694, 704, 711, 713-715, 717, 720-723, 728- |
| | 734, 742-743, 745, 747, 750, 752-754, 756- |
| | 758, 760, 762, 766, 769-773, 775, 777-779, 781-784, 787, 790- |
| | 794, 798, 800, 803, 805-806, 809, 811-812, 814, 818-819, 824- |
| | 825, 827, 829, 831, 833, 835, 838-839, 841-842, 847, 850- |
| | 855, 857-859, 861, 864, 870-873, 875, 878-879 |

[0640] Accordingly, the present disclosure provides a guide RNA for use in a base editing system for introducing a target change into a target DNA sequence identified by the BE-Hive method disclosed herein.

[0641] In some embodiments, the guide RNA comprises a protospacer selected from the group consisting of SEQ ID Nos: 451-3199 of Table 5. The guide RNA of Table 5 are those where at least one base editor demonstrated at least 50% correction precision to the wild-type genotype among edited reads in accordance with Example 1. The base editors used in Example 1 can be ABE (SEQ ID NO: 3210), ABE-CP1041 (SEQ ID NO: 3211), AID-BE4 (SEQ ID NO: 3202), BE4 (SEQ ID NO: 3200), BE4-CP1028 (SEQ ID NO: 3208), CDA-BE4 (SEQ ID NO: 3203), eA3A-BE4 (SEQ ID NO: 3205), eA3A_T31AT44A, or evoAPOBEC1-BE4max (SEQ ID NO: 3204).

[0642] In some embodiments, the base editing system comprises an ABE of SEQ ID NO: 3210 and said guide RNA comprises a protospacer identified as any of the sequences of Index Nos. 880-2498 of Table 5.

[0643] In other embodiments, the base editing system comprises an ABE-CP1041 of SEQ ID NO: 3211, and said guide RNA comprises a protospacer identified as any of the sequences of Index Nos. 880-990, 998-1014, 1042-1313, 1749-2184, 2186-2695 of Table 5.

[0644] In still other embodiments, the base editing system comprises an AID-BE4 of SEQ ID NO: 3202, and said guide RNA comprises a protospacer identified as any of the sequences of Index Nos. 1-301 of Table 5.

[0645] In other embodiments, the base editing system comprises an BE4 of SEQ ID NO: 3200, and said guide RNA comprises a protospacer identified as any of the sequences of Index Nos. 2-3, 6-12, 16-17, 19-27, 40-42, 44, 47-48, 52-53, 55-58, 62-65, 68, 70, 74-78, 80, 82-92, 94-98, 198, 200-204, 207, 210-211, 213-219, 222-224, 226-229, 231-233, 235-236, 238, 244, 247-248, 252-255, 257-258, 260, 263-270, 272-275, 279, 281-287, 289-290, 293-294, 296, 298-299, 301, 541, 543-626, 628-712, 722-723, 798-838, 840-848, 858-878 of Table 5.

[0646] In still other embodiments, the base editing system comprises an BE4-CP1028 of SEQ ID NO: 3208, and said guide RNA comprises a protospacer identified as any of the sequences of Index Nos. 2-3, 5-9, 11-15, 17-27, 40, 42, 44, 47-50, 52-54, 56-58, 63, 65, 74-75, 77, 79-83, 85, 87-93, 96-98, 157, 162, 182, 263, 302, 305, 308, 313, 315, 324, 336, 338, 341, 343, 345, 403, 407-411, 413, 415-416, 418-419, 421, 423-427, 429-440, 461-464, 467-468, 470-471, 473, 508-514, 516-520, 522-524, 526-535, 537, 539-540, 544, 586, 588-590, 592-605, 607, 621, 624, 632, 702-703, 705-708, 710-712, 723, 799-801, 803-804, 807-808, 810, 813-816, 818-828, 830-835, 837-838, 840-848, 858-860, 864-873, 876-878 of Table 5.

[0647] In yet other embodiments, the base editing system comprises an CDA-BE4 of SEQ ID NO: 3203, and said guide RNA comprises a protospacer identified as any of the sequences of Index Nos. 4, 6-7, 9-13, 15-17, 20-24, 26, 31-32, 35, 40-41, 44, 47-50, 52-53, 55, 63-65, 68, 70-72, 75-81, 84-87, 89-94, 98, 100-101, 103-104, 107, 109, 111, 113, 118-121, 124-127, 130-132, 136, 141-144, 146-148, 151-160, 162, 164, 166-167, 170, 172-173, 175-180, 184, 195, 198, 200-204, 206-215, 218-219, 221-224, 226-227, 230, 233-234, 237, 239, 243-244, 247, 251-257, 261-267, 274, 281-284, 286-287, 289-290, 292, 295, 297-302, 304, 411-412, 414, 417, 420, 422-423, 425, 428, 431, 433, 435, 438, 442-445, 457, 463, 472, 477-479, 485, 488, 491, 493-494, 507, 510, 513, 515, 518, 521, 536, 538, 540, 542, 552, 561, 563-569, 573-582, 587-588, 591, 593-595, 598, 622-623, 625, 627, 640, 667, 704, 712-721, 724-727, 734-752, 755, 759, 761-768, 773-774, 776, 780, 785-786, 788-789, 795-797, 800, 802, 805-806, 811-812, 814, 817-818, 820, 829, 831, 833, 835, 839-842, 849, 852, 854, 856, 861, 864, 874-875, 878-879 of Table 5.

[0648] In still other embodiments, the base editing system comprises an eA3A-BE4 of SEQ ID NO: 3204, and said guide RNA comprises a protospacer identified as any of the sequences of Index Nos. 2-3, 6, 8-10, 13, 15-17, 20, 22-23, 25, 27-28, 32, 35, 42, 45-47, 53, 55-56, 63-64, 74, 76, 80-81, 86-92, 96-98, 111, 119, 121, 127, 151, 154, 156, 159-160, 171, 178, 180, 184, 192, 198, 204-206, 210-211, 214, 216-217, 220, 224, 228-229, 231-233, 235, 244, 247, 252-253, 260, 263-268, 270, 272-274, 276, 279, 281-285, 287-289, 293-294, 296, 298, 303-304, 306-312, 314, 316-317, 319-323, 326-329, 331-337, 339, 343-345, 347-348, 352-362, 364-372, 374-406, 410-411, 432-434, 438, 446-447, 449-453, 456, 458, 460, 466, 468-469, 474-476, 481, 486, 489-490, 492, 495-506, 521, 523, 525, 539, 543-551, 553-556, 558-564, 569, 573, 575, 578-579, 581, 583-584, 588, 590, 593, 595-596, 598-600, 602, 604, 607, 614-620, 622, 624, 626, 628-630, 632-639, 641-647, 651, 657, 660, 662-663, 665-666, 668-671, 673-674, 678, 686-689, 691-693, 695-700, 702-703, 707-709, 711-712, 715, 723, 741, 800-806, 808, 811, 813-821, 823-827, 829-830, 832-833, 835, 844, 846-849, 852, 858-860, 865-866, 868-870, 872-874, 878, 2696-2737 of Table 5.

[0649] In still other embodiments, the base editing system comprises an eA3A_T31AT44A of SEQ ID NO: 3206, and said guide RNA comprises a protospacer identified as any of the sequences of Index Nos. 2725-2726 and 2738-2749 of Table 5.

[0650] In still other embodiments, the base editing system comprises an evoAPOBEC1-BE4max of SEQ ID NO: 3204, and said guide RNA comprises a protospacer identified as any of the sequences of Index Nos. 1-4, 6-7, 9-11, 13, 15-18, 20, 22-27, 32, 35, 40-42, 44, 47-49, 51-53, 55-56, 58, 61-63, 68, 70-72, 74, 76-82, 84-92, 94-98, 100, 104, 108, 111, 116, 121, 125-126, 131, 136, 141-143, 146-148, 150-151, 153, 155-160, 162, 170, 172, 175, 178-180, 183-184, 190, 195, 198, 200-201, 203-204, 206, 210-212, 214, 217, 220-221, 223-227, 229, 231-233, 235-239, 244, 247, 249, 252-258, 263-270, 272-274, 276, 278-279, 281-284, 286-290, 293-294, 296, 298, 300-301, 304, 318, 321, 324-325, 330-333, 338, 340, 342, 346, 349-351, 358, 363, 373, 379-380, 385-389, 411, 423, 425, 427, 431, 433, 438, 441, 445, 448, 454-455, 459, 463, 465, 472, 476, 480, 482-484, 487, 491, 493-494, 503, 510, 514, 517, 521, 535, 540, 542, 544-545, 551-555, 558-564, 567-568, 573-576, 579-582, 588-589, 593, 595-596, 598, 600, 603, 605, 610, 612-617, 620, 622, 625-626, 628, 630-631, 635-641, 644, 651, 653-654, 656, 676, 678-679, 682, 688, 694, 704, 711, 713-715, 717, 720-723, 728-734, 742-743, 745, 747, 750, 752-754, 756-758, 760, 762, 766, 769-773, 775, 777-779, 781-784, 787, 790-794, 798, 800, 803, 805-806, 809, 811-812, 814, 818-819, 824-825, 827, 829, 831, 833, 835, 838-839, 841-842, 847, 850-855, 857-859, 861, 864, 870-873, 875, 878-879 of Table 5.

### General Considerations in Guide RNA Design

[0651] In general, a guide sequence is any polynucleotide sequence having sufficient complementarity with a target polynucleotide sequence to hybridize with the target sequence and direct sequence-specific binding of a napDNAbp (e.g., a Cas9, Cas9 homolog, or Cas9 variant) to the target sequence, such as a sequence within an SMN2 gene that comprises a C840T point mutation. In some embodiments, the degree of complementarity between a guide sequence and its corresponding target sequence (e.g., SMN2), when optimally aligned using a suitable alignment algorithm, is about or more than about 50%, 60%, 75%, 80%, 85%, 90%, 95%, 97.5%, 99%, or more. Optimal alignment may be determined with the use of any suitable algorithm for aligning sequences, non-limiting example of which include the Smith-Waterman algorithm, the Needleman-Wunsch algorithm, algorithms based on the Burrows-Wheeler Transform (e.g. the Burrows Wheeler Aligner), ClustalW, Clustal X, BLAT, Novoalign (Novocraft Technologies, ELAND (Illumina, San Diego, Calif.), SOAP (available at soap.genomics.org.cn), and Maq (available at maq.sourceforge.net). In some embodiments, a guide sequence is about or more than about 5, 10, 11, 12, 13, 14, 15, 16, 17, 18, 19, 20, 21, 22, 23, 24, 25, 26, 27, 28, 29, 30, 31, 32, 33, 34, 35, 40, 45, 50, 75, or more nucleotides in length.

[0652] In some embodiments, a guide sequence is less than about 75, 50, 45, 40, 35, 30, 25, 20, 15, 12, or fewer nucleotides in length. The ability of a guide sequence to direct sequence-specific binding of a base editor to a target sequence may be assessed by any suitable assay. For example, the components of a base editor, including the guide sequence to be tested, may be provided to a host cell having the corresponding target sequence (e.g., a HGADFN 167 or HGADFN 188 cell line), such as by transfection with vectors encoding the components of a base editor disclosed herein, followed by an assessment of preferential cleavage within the target sequence, such as by Surveyor assay as described herein. Similarly, cleavage of a target polynucleotide sequence may be evaluated in a test tube by providing the target sequence, components of a base editor, including the guide sequence to be tested and a control guide sequence different from the test guide sequence, and comparing binding or rate of cleavage at the target sequence between the test and control guide sequence reactions. Other assays are possible, and will occur to those skilled in the art.

[0653] In some embodiments, a guide sequence is selected to reduce the degree of secondary structure within the guide sequence. Secondary structure may be determined by any suitable polynucleotide folding algorithm. Some programs are based on calculating the minimal Gibbs free energy. An example of one such algorithm is mFold, as described by Zuker and Stiegler (Nucleic Acids Res. 9 (1981), 133-148). Another example folding algorithm is the online webserver RNAfold, developed at Institute for Theoretical Chemistry at the University of Vienna, using the centroid structure prediction algorithm (see e.g. A. R. Gruber et al., 2008, Cell 106(1): 23-24; and P A Carr and G M Church, 2009, Nature Biotechnology 27(12): 1151-62). Further algorithms may be found in U.S. application Ser. No. 61/836,080; Broad Reference BI-2013/004A); incorporated herein by reference.

[0654] In general, a tracr mate sequence includes any sequence that has sufficient complementarity with a tracr sequence to promote one or more of: (1) excision of a guide sequence flanked by tracr mate sequences in a cell containing the corresponding tracr sequence; and (2) formation of a complex at a target sequence, wherein the complex comprises the tracr mate sequence hybridized to the tracr sequence. In general, degree of complementarity is with reference to the optimal alignment of the tracr mate sequence and tracr sequence, along the length of the shorter of the two sequences. Optimal alignment may be determined by any suitable alignment algorithm, and may further account for secondary structures, such as self-complementarity within either the tracr sequence or tracr mate sequence. In some embodiments, the degree of complementarity between the tracr sequence and tracr mate sequence along the length of the shorter of the two when optimally aligned is about or more than about 25%, 30%, 40%, 50%, 60%, 70%, 80%, 90%, 95%, 97.5%, 99%, or higher. In some embodiments, the tracr sequence is about or more than about 5, 6, 7, 8, 9, 10, 11, 12, 13, 14, 15, 16, 17, 18, 19, 20, 25, 30, 40, 50, or more nucleotides in length. In some embodiments, the tracr sequence and tracr mate sequence are contained within a single transcript, such that hybridization between the two produces a transcript having a secondary structure, such as a hairpin. Preferred loop forming sequences for use in hairpin structures are four nucleotides in length, and most preferably have the sequence GAAA. However, longer or shorter loop sequences may be used, as may alternative sequences. The sequences preferably include a nucleotide triplet (for example, AAA), and an additional nucleotide (for example C or G). Examples of loop forming sequences include CAAA and AAAG. In an embodiment of the invention, the transcript or transcribed polynucleotide sequence has at least two or more hairpins. In preferred embodiments, the transcript has two, three, four or five hairpins. In a further embodiment of the invention, the transcript has at most five hairpins. In some embodiments, the single transcript further includes a transcription termination sequence; preferably this is a polyT sequence, for example six T nucleotides. Further non-limiting examples of single polynucleotides comprising a guide sequence, a tracr mate sequence, and a tracr sequence are as follows (listed 5′ to 3′), where “N” represents a base of a guide sequence, the first block of lower case letters represent the tracr mate sequence, and the second block of lower case letters represent the tracr sequence, and the final poly-T sequence represents the transcription terminator:

(SEQ ID NO: 297)
(1) NNNNNNNNgtttttgtactctcaagatttaGAAAtaaatcttgcag
aagctacaaagataaggcttcatgccgaaatcaacaccctgtcattttat
ggcagggtgttttcgttatttaaTTTTTT;
(SEQ ID NO: 298)
(2) NNNNNNNNNNNNNNNNNNgtttttgtactctcaGAAAtgcagaagc
tacaaagataaggcttcatgccgaaatcaacaccctgtcattttatggca
gggtgttttcgttatttaaTTTTTT;
(SEQ ID NO: 299)
(3) NNNNNNNNNNNNNNNNNNNNgtttttgtactctcaGAAAtgcagaa
gctacaaagataaggcttcatgccgaaatca acaccctgtcattttatg
gcagggtgtTTTTT;
(SEQ ID NO: 300)
(4) NNNNNNNNNNNNNNNNNNNNgttttagagctaGAAAtagcaagtta
aaataaggctagtccgttatcaacttgaaaa agtggcaccgagtcggtg
cTTTTTT;
(SEQ ID NO: 301)
(5) NNNNNNNNNNNNNNNNNNNNgttttagagctaGAAATAGcaagtta
aaataaggctagtccgttatcaacttgaa aaagtgTTTTTTT;
and
(SEQ ID NO: 302)
(6) NNNNNNNNNNNNNNNNNNNNgttttagagctagAAATAGcaagtta
aaataaggctagtccgttatcaTTTTT TTT.

[0655] The disclosure also relates to guide RNA sequences that are variants of any of the herein disclosed guide RNA sequences or target sequences (including SEQ ID NOs.: 250-302), wherein the variants include guide RNA sequences or target sequences having a deletion of 1, 2, 3, 4, 5, 6, 7, 8, 9, 10, 11, 12, 13, 14, 15, 16, 17, 18, 19, 20, 21, 22, 23, 24, 25, 26, 27, 28, 29, or 30 nucleotides from any of the guide RNA or target sequence disclosed herein (e.g., SEQ ID NOs.: 250-302). In other embodiments, the variants also include guide RNA sequences or target sequences having at least 70%, 71%, 72%, 73%, 74%, 75%, 76%, 77%, 78%7, 79%, 80%, 81%, 82%, 83%, 84%, 85%, 86%, 87%, 88%, 89%, 90%, 91%, 92%, 93%, 94%, 95%, 96%, 97%, 98%, 99%, or up to 99.9% sequence identity with a guide RNA or target sequence disclosed herein (e.g., SEQ ID NOs.: 250-302).

[0656] In some embodiments, sequences (1) to (3) are used in combination with Cas9 from S. thermophilus CRISPR. In some embodiments, sequences (4) to (6) are used in combination with Cas9 from S. pyogenes. In some embodiments, the tracr sequence is a separate transcript from a transcript comprising the tracr mate sequence.

[0657] It will be apparent to those of skill in the art that in order to target any of the fusion proteins comprising a Cas9 domain and an adenosine deaminase, as disclosed herein, to a target site, e.g., a site comprising a C840T point mutation in SMN2 to be edited, it is typically necessary to co-express the fusion protein together with a guide RNA, e.g., an sgRNA. As explained in more detail elsewhere herein, a guide RNA typically comprises a tracrRNA framework allowing for Cas9 binding, and a guide sequence, which confers sequence specificity to the Cas9:nucleic acid editing enzyme/domain fusion protein.

[0658] In some embodiments, the guide RNA comprises a structure 5′-[guide sequence]-[Cas9-binding sequence]-3′, where the Cas9 binding sequence comprises a nucleic acid sequence that is at least 70%, 75%, 80%, 85%, 90%, 95%, 96%, 97%, 98%, 99%, or 99.5% identical to SEQ ID NO: 306-323, and which are effective to targeting the C840T point mutation in SMN2. In other embodiments, the guide RNA comprises a structure 5′-[guide sequence]-[Cas9-binding sequence]-3′, where the Cas9 binding sequence comprises a nucleic acid sequence that is at least 70%, 75%, 80%, 85%, 90%, 95%, 96%, 97%, 98%, 99%, or 99.5% identical to SEQ ID NO: 324-329, and which are effective to targeting a stop codon in exon 8 of SMN2. In yet other embodiments, the guide RNA comprises a structure 5′-[guide sequence]-[Cas9-binding sequence]-3′, where the Cas9 binding sequence comprises a nucleic acid sequence that is at least 70%, 75%, 80%, 85%, 90%, 95%, 96%, 97%, 98%, 99%, or 99.5% identical to SEQ ID NO: 330, and which are effective to targeting the S270 amino acid in exon 6 of SMN2. In some embodiments, the guide RNA comprises a structure 5′-[guide sequence]-[Cas9-binding sequence]-3′, where the Cas9 binding sequence comprises a nucleic acid sequence SEQ ID NO: 303, SEQ ID NO: 304, or SEQ ID NO: 303 or 304 absent the poly-U terminator sequence at the 3′ end.

(SEQ ID NO: 303)
5′GUUUUAGAGCUAGAAAUAGCAAGUUAAAAUAAAGGCUAGUCCGUUAU
CAACUUGAAAAAGUGGCACCGAGUCGGUGCUUUUU-3′
(SEQ ID NO: 304)
5′GUUUUAGAGCUAGAAAUAGCAAGUUAAAAUAAGGCUAGUCCGUUAUC
AACUUGAAAAAGUGGCACCGAGUCGGUGCUUUUUUU-3′

[0659] In some embodiments, the guide RNA comprises a nucleic acid sequence that is at least 70%, 75%, 80%, 85%, 90%, 95%, 96%, 97%, 98%, 99%, or 99.5% identical to SEQ ID NO: 305, or SEQ ID NO: 305 absent the poly-U terminator sequence at the 3′ end. In some embodiments, the guide RNA comprises the nucleic acid sequence SEQ ID NO: 305, or SEQ ID NO: 305 absent the poly-U terminator sequence at the 3′ end.

[0660] In some embodiments, the guide RNA comprises the nucleic acid sequence

(SEQ ID NO: 305)
5′GGUCCACCCACCUGGGCUCCGUUUUAGAGCUAGAAAUAGCAAGUUAA
AAUAAGGCUAGUCCGUUAUCAACUUGAAAAAGUGGCACCGAGUCGGUGC
UUUUUUU-3′.

[0661] The disclosure also provides guide sequences that are truncated variants of any of the guide sequences provided herein (e.g., SEQ ID NOs: 306-330). In some embodiments, the guide sequence comprises the amino acid sequence of any one of SEQ ID NOs: 306-330, absent the first 1, 2, 3, 4, 5, 6, 7, 8, 9, or 10 nucleic acid residues from the 5′ end. It should be appreciated that any of the 5′ truncated guide sequences provided herein may further comprise a G residue at the 5′ end. In some embodiments, the guide sequence comprises the amino acid sequence of any one of SEQ ID NOs: 306-330, absent the first 1, 2, 3, 4, 5, 6, 7, 8, 9, 10, 11, or 12 nucleic acid residues from the 3′ end.

[0662] The disclosure also provides guide sequences that are longer variants of any of the guide sequences provided herein (e.g., SEQ ID NOs: 306-330). In some embodiments, the guide sequence comprises one additional residue that is 5′-U-3′ at the 3′ end of any one of SEQ ID NOs: 306-330. In some embodiments, the guide sequence comprises two additional residues that are 5′-UG-3′ at the 3′ end of any one of SEQ ID NOs: 306-330. In some embodiments, the guide sequence comprises three additional residues that are 5′-UGA-3′ at the 3′ end of any one of SEQ ID NOs: 306-330. In some embodiments, the guide sequence comprises four additional residues that are 5′-UGAG-3′ at the 3′ end of any one of SEQ ID NOs: 306-330. In some embodiments, the guide sequence comprises five additional residues that are 5′-UGAGC-3′ at the 3′ end of any one of SEQ ID NOs: 306-330. In some embodiments, the guide sequence comprises six additional residues that are 5′-UGAGCC-3′ at the 3′ end of any one of SEQ ID NOs: 306-330. In some embodiments, the guide sequence comprises seven additional residues that are 5′-UGAGCCG-3′ at the 3′ end of any one of SEQ ID NOs: 306-330. In some embodiments, the guide sequence comprises eight additional residues that are 5′-UGAGCCGC-3′ at the 3′ end of any one of SEQ ID NOs: 306-330. In some embodiments, the guide sequence comprises nine additional residues that are 5′-UGAGCCGCU-3′ at the 3′ end of any one of SEQ ID NOs: 306-330. In some embodiments, the guide sequence comprises ten additional residues that are 5′-UGAGCCGCUG-3′ (SEQ ID NO: 400) at the 3′ end of any one of SEQ ID NOs: 306-330. In some embodiments, the guide sequence comprises eleven additional residues that are 5′-UGAGCCGCUGG-3′ (SEQ ID NO: 401) at the 3′ end of any one of SEQ ID NOs: 306-330.

[0663] VII. Fusion Protein/2RNA Complexes

[0664] Some aspects of this disclosure provide complexes comprising any of the fusion proteins (e.g., base editor) provided herein, for example any of the adenosine base editors provided herein, and a guide nucleic acid bound to napDNAbp of the fusion protein. In some embodiments, the guide nucleic acid is any one of the guide RNAs provided herein. In some embodiments, the disclosure provides any of the fusion proteins (e.g., adenosine base editors) provided herein bound to any of the guide RNAs provided herein. In some embodiments, the napDNAbp of the fusion protein (e.g., adenosine base editor) is a Cas9 domain (e.g., a dCas9, a nuclease active Cas9, or a Cas9 nickase), which is bound to a guide RNA. In some embodiments, the complexes provided herein are configured to generate a mutation in a nucleic acid, for example to correct a point mutation in a gene (e.g., SMN2) to modulate expression of one or more proteins (e.g., SMN).

[0665] In some embodiments, the guide RNA comprises a guide sequence that comprises at least 8, 9, 10, 11, 12, 13, 14, 15, 16, 17, 18, 19, 20, 21, 22, 23, 24, 25, 26, 27, 28, 29, or 30 contiguous nucleic acids that are 100% complementary to a target sequence, for example a target DNA sequence (e.g., a target DNA sequence of any one of SEQ ID NOs: 253-296 and 398-399). In some embodiments, the guide RNA comprises a guide sequence that comprises at least 8, 9, 10, 11, 12, 13, 14, 15, 16, 17, 18, 19, 20, 21, 22, 23, 24, 25, 26, 27, 28, 29, or 30 contiguous nucleic acids that are 100% complementary to a DNA sequence in a SMN2 gene (e.g., a target DNA sequence of any one of SEQ ID NOs: 253-296 and 398-399), for example a region of a human SMN2 gene.

[0666] In some embodiments, any of the complexes provided herein comprise a gRNA having a guide sequence that comprises at least 8, 9, 10, 11, 12, 13, 14, 15, 16, 17, 18, 19, 20, 21, 22, 23, 24, 25, 26, 27, 28, 29, or 30 contiguous nucleic acids that are 100% complementary to any one of the nucleic acid sequences provided herein. It should be appreciated that the guide sequence of the gRNA may comprise one or more nucleotides that are not complementary to a target sequence. In some embodiments, the guide sequence of the gRNA is at the 5′ end of the gRNA. In some embodiments, the guide sequence of the gRNA further comprises a G at the 5′ end of the gRNA. In some embodiments, the G at the 5′ end of the gRNA is not complementary with the target sequence. In some embodiments, the guide sequence of the gRNA comprises 1, 2, 3, 4, 5, 6, 7, or 8 nucleotides that are not complementary to a target sequence (e.g., any of the target sequences provided herein (e.g., SEQ ID NOs: 297-305, 306-362, 400-401, and 405-406)). In some embodiments, the gRNA comprises the sequence of SEQ ID NO: 297, or the sequence of any one of SEQ ID NOs: 297-305, 306-362, 400-401, and 405-406, where the nucleotide target is indicated in bold. It should be appreciated that the T's indicated in any of the gRNA sequences of SEQ ID NOs: 297-305, 306-362, 400-401, and 405-406 are uricils (Us) in the RNA sequence. Accordingly, in some embodiments, the gRNA comprises the sequence 5′-AUUUUGUCUAAAACCCUGUA-3′ (SEQ ID NO: 312).

[0667] A complex comprising a base editor and a guide RNA selected from the method of claim 1 or a guide RNA of any one of claims 52-64.

[0668] The complex of claim 65, wherein the base editor comprises a napDNAbp.

[0669] The complex of claim 66, wherein the napDNAbp is a Cas9 or variant thereof.

[0670] The complex of claim 66, wherein the napDNAbp is a wildtype SpCas9 comprising an amino acid sequence of SEQ ID NO: 5, or an amino acid sequence having at least 80%, 85%, 90%, 95%, or 99% sequence identity with SEQ ID NO: 5.

[0671] The complex of claim 66, wherein the napDNAbp is a wildtype SpCas9 comprising an amino acid sequence of SEQ ID NOs: 5, 8, 10, 12, and 407 or an amino acid sequence having at least 80%, 85%, 90%, 95%, or 99% sequence identity with any one of SEQ ID NOs: 5, 8, 10, 12, or 407.

[0672] The complex of claim 66, wherein the napDNAbp is a SpCas9 ortholog or homolog comprising an amino acid sequence of SEQ ID Nos: 13-26, 44-63, or 74-77, or an amino acid sequence having at least 80%, 85%, 90%, 95%, or 99% sequence identity with any one of SEQ ID NOs: 13-26, 44-63, or 74-77.

[0673] The complex of claim 66, wherein the napDNAbp is a dead Cas9 comprising an amino acid sequence of SEQ ID Nos: 27-28, or an amino acid sequence having at least 80%, 85%, 90%, 95%, or 99% sequence identity with any one of SEQ ID NOs: 27-28.

[0674] The complex of claim 66, wherein the napDNAbp is a nickase Cas9 comprising an amino acid sequence of SEQ ID Nos: 29-44, or an amino acid sequence having at least 80%, 85%, 90%, 95%, or 99% sequence identity with any one of SEQ ID NOs: 29-44.

[0675] The complex of claim 66, wherein the napDNAbp is a circular permutant variant of Cas9 comprising an amino acid sequence of SEQ ID Nos: 64-73, or an amino acid sequence having at least 80%, 85%, 90%, 95%, or 99% sequence identity with any one of SEQ ID NOs: 64-73.

[0676] The complex of claim 65, wherein the base editor comprises an adenine deaminase.

[0677] The complex of claim 65, wherein the base editor comprises a cytidine deaminase.

[0678] The complex of claim 74, wherein the adenine deaminase comprises an amino acid sequence of any one of SEQ ID NOs: 78-91, 403, or 462, or an amino acid sequence having at least 80%, 85%, 90%, 95%, or 99% sequence identity with any one of SEQ ID NOs: 78-91, 403, or 462.

[0679] The complex of claim 75, wherein the cytidine deaminase comprises an amino acid sequence of any one of SEQ ID NOs: 92-134, or an amino acid sequence having at least 80%, 85%, 90%, 95%, or 99% sequence identity with any one of SEQ ID NOs: 92-134.

[0680] The complex of claim 65, wherein the base editor comprises one or more linkers having an amino acid sequence comprising any one of SEQ ID NOs.: 135-151, or an amino acid sequence having at least 80%, 85%, 90%, 95%, or 99% sequence identity with any one of SEQ ID NOs: 135-151.

[0681] The complex of claim 65, wherein the base editor comprises one or more NLS having an amino acid sequence comprising any one of SEQ ID NOs.: 152-162, or an amino acid sequence having at least 80%, 85%, 90%, 95%, or 99% sequence identity with any one of SEQ ID NOs: 152-162.

[0682] The complex of claim 65, wherein the base editor comprises one or more UGI having an amino acid sequence comprising SEQ ID NO.: 163, or an amino acid sequence having at least 80%, 85%, 90%, 95%, or 99% sequence identity with SEQ ID NO:163.

[0683] The complex of claim 65, wherein the base editor is an adenosine base editor comprising an amino acid sequence of any one of SEQ ID NOs: 174-221 or 463-476, or an amino acid sequence having at least 80%, 85%, 90%, 95%, or 99% sequence identity with any one of SEQ ID NOs: 174-221 or 463-476.

[0684] The complex of claim 65, wherein the base editor is a cytidine base editor comprising an amino acid sequence of any one of SEQ ID NOs: 223-248, or an amino acid sequence having at least 80%, 85%, 90%, 95%, or 99% sequence identity with any one of SEQ ID NOs: 223-248.

[0685] The complex of claim 65, wherein the base editor is ABE (SEQ ID NO: 3210), ABE-CP1041 (SEQ ID NO: 3211), AID-BE4 (SEQ ID NO: 3202), BE4 (SEQ ID NO: 3200), BE4-CP1028 (SEQ ID NO: 3208), CDA-BE4 (SEQ ID NO: 3203), eA3A-BE4 (SEQ ID NO: 3205), eA3A_T31AT44A (SEQ ID NO: 3206), or evoAPOBEC1-BE4max (SEQ ID NO: 3204), or an amino acid sequence having at least 80%, 85%, 90%, 95%, or 99% sequence identity with any one of SEQ ID NOs: 3210, 3211, 3202, 3200, 3208, 3203, 3205, 3206, or 3204.

[0686] The complex of claim 65, wherein the guide RNA comprises a spacer corresponding to any one of the protospacers of SEQ ID Nos: 451-3199.

[0687] The complex of claim 65, wherein the base editing system comprises an ABE of SEQ ID NO: 3210 and said guide RNA comprises a spacer corresponding to any one of the protospacers identified as a sequence of Index Nos. 880-2498 of Table 6.

[0688] The complex of claim 65, wherein the base editing system comprises an ABE-CP1041 of SEQ ID NO: 3211, said guide RNA comprises a spacer corresponding to any one of the protospacers identified as a sequence of Index Nos. 880-990, 998-1014, 1042-1313, 1749-2184, 2186-2695 of Table 6.

[0689] The complex of claim 65, wherein the base editing system comprises an AID-BE4 of SEQ ID NO: 3202, said guide RNA comprises a spacer corresponding to any one of the protospacers identified as a sequence of Index Nos. 1-301 of Table 6.

[0690] The complex of claim 65, wherein the base editing system comprises an BE4 of SEQ ID NO: 3200, said guide RNA comprises a spacer corresponding to any one of the protospacers identified as a sequence of Index Nos. 2-3, 6-12, 16-17, 19-27, 40-42, 44, 47-48, 52-53, 55-58, 62-65, 68, 70, 74-78, 80, 82-92, 94-98, 198, 200-204, 207, 210-211, 213-219, 222-224, 226-229, 231-233, 235-236, 238, 244, 247-248, 252-255, 257-258, 260, 263-270, 272-275, 279, 281-287, 289-290, 293-294, 296, 298-299, 301, 541, 543-626, 628-712, 722-723, 798-838, 840-848, 858-878 of Table 6.

[0691] The complex of claim 65, wherein the base editing system comprises an BE4-CP1028 of SEQ ID NO: 3208, said guide RNA comprises a spacer corresponding to any one of the protospacers identified as a sequence of Index Nos. 2-3, 5-9, 11-15, 17-27, 40, 42, 44, 47-50, 52-54, 56-58, 63, 65, 74-75, 77, 79-83, 85, 87-93, 96-98, 157, 162, 182, 263, 302, 305, 308, 313, 315, 324, 336, 338, 341, 343, 345, 403, 407-411, 413, 415-416, 418-419, 421, 423-427, 429-440, 461-464, 467-468, 470-471, 473, 508-514, 516-520, 522-524, 526-535, 537, 539-540, 544, 586, 588-590, 592-605, 607, 621, 624, 632, 702-703, 705-708, 710-712, 723, 799-801, 803-804, 807-808, 810, 813-816, 818-828, 830-835, 837-838, 840-848, 858-860, 864-873, 876-878 of Table 6.

[0692] The complex of claim 65, wherein the base editing system comprises an CDA-BE4 of SEQ ID NO: 3203, said guide RNA comprises a spacer corresponding to any one of the protospacers identified as a sequence of Index Nos. 4, 6-7, 9-13, 15-17, 20-24, 26, 31-32, 35, 40-41, 44, 47-50, 52-53, 55, 63-65, 68, 70-72, 75-81, 84-87, 89-94, 98, 100-101, 103-104, 107, 109, 111, 113, 118-121, 124-127, 130-132, 136, 141-144, 146-148, 151-160, 162, 164, 166-167, 170, 172-173, 175-180, 184, 195, 198, 200-204, 206-215, 218-219, 221-224, 226-227, 230, 233-234, 237, 239, 243-244, 247, 251-257, 261-267, 274, 281-284, 286-287, 289-290, 292, 295, 297-302, 304, 411-412, 414, 417, 420, 422-423, 425, 428, 431, 433, 435, 438, 442-445, 457, 463, 472, 477-479, 485, 488, 491, 493-494, 507, 510, 513, 515, 518, 521, 536, 538, 540, 542, 552, 561, 563-569, 573-582, 587-588, 591, 593-595, 598, 622-623, 625, 627, 640, 667, 704, 712-721, 724-727, 734-752, 755, 759, 761-768, 773-774, 776, 780, 785-786, 788-789, 795-797, 800, 802, 805-806, 811-812, 814, 817-818, 820, 829, 831, 833, 835, 839-842, 849, 852, 854, 856, 861, 864, 874-875, 878-879 of Table 6.

[0693] The complex of claim 65, wherein the base editing system comprises an eA3A-BE4 of SEQ ID NO: 3204, said guide RNA comprises a spacer corresponding to any one of the protospacers identified as a sequence of Index Nos. 2-3, 6, 8-10, 13, 15-17, 20, 22-23, 25, 27-28, 32, 35, 42, 45-47, 53, 55-56, 63-64, 74, 76, 80-81, 86-92, 96-98, 111, 119, 121, 127, 151, 154, 156, 159-160, 171, 178, 180, 184, 192, 198, 204-206, 210-211, 214, 216-217, 220, 224, 228-229, 231-233, 235, 244, 247, 252-253, 260, 263-268, 270, 272-274, 276, 279, 281-285, 287-289, 293-294, 296, 298, 303-304, 306-312, 314, 316-317, 319-323, 326-329, 331-337, 339, 343-345, 347-348, 352-362, 364-372, 374-406, 410-411, 432-434, 438, 446-447, 449-453, 456, 458, 460, 466, 468-469, 474-476, 481, 486, 489-490, 492, 495-506, 521, 523, 525, 539, 543-551, 553-556, 558-564, 569, 573, 575, 578-579, 581, 583-584, 588, 590, 593, 595-596, 598-600, 602, 604, 607, 614-620, 622, 624, 626, 628-630, 632-639, 641-647, 651, 657, 660, 662-663, 665-666, 668-671, 673-674, 678, 686-689, 691-693, 695-700, 702-703, 707-709, 711-712, 715, 723, 741, 800-806, 808, 811, 813-821, 823-827, 829-830, 832-833, 835, 844, 846-849, 852, 858-860, 865-866, 868-870, 872-874, 878, 2696-2737 of Table 6.

[0694] The complex of claim 65, wherein the base editing system comprises an eA3A_T31AT44A of SEQ ID NO: 3206, said guide RNA comprises a spacer corresponding to any one of the protospacers identified as a sequence of Index Nos. 2725-2726 and 2738-2749 of Table 6.

[0695] The complex of claim 65, wherein the base editing system comprises an evoAPOBEC1-BE4max of SEQ ID NO: 3204, said guide RNA comprises a spacer corresponding to any one of the protospacers identified as a sequence of Index Nos. 1-4, 6-7, 9-11, 13, 15-18, 20, 22-27, 32, 35, 40-42, 44, 47-49, 51-53, 55-56, 58, 61-63, 68, 70-72, 74, 76-82, 84-92, 94-98, 100, 104, 108, 111, 116, 121, 125-126, 131, 136, 141-143, 146-148, 150-151, 153, 155-160, 162, 170, 172, 175, 178-180, 183-184, 190, 195, 198, 200-201, 203-204, 206, 210-212, 214, 217, 220-221, 223-227, 229, 231-233, 235-239, 244, 247, 249, 252-258, 263-270, 272-274, 276, 278-279, 281-284, 286-290, 293-294, 296, 298, 300-301, 304, 318, 321, 324-325, 330-333, 338, 340, 342, 346, 349-351, 358, 363, 373, 379-380, 385-389, 411, 423, 425, 427, 431, 433, 438, 441, 445, 448, 454-455, 459, 463, 465, 472, 476, 480, 482-484, 487, 491, 493-494, 503, 510, 514, 517, 521, 535, 540, 542, 544-545, 551-555, 558-564, 567-568, 573-576, 579-582, 588-589, 593, 595-596, 598, 600, 603, 605, 610, 612-617, 620, 622, 625-626, 628, 630-631, 635-641, 644, 651, 653-654, 656, 676, 678-679, 682, 688, 694, 704, 711, 713-715, 717, 720-723, 728-734, 742-743, 745, 747, 750, 752-754, 756-758, 760, 762, 766, 769-773, 775, 777-779, 781-784, 787, 790-794, 798, 800, 803, 805-806, 809, 811-812, 814, 818-819, 824-825, 827, 829, 831, 833, 835, 838-839, 841-842, 847, 850-855, 857-859, 861, 864, 870-873, 875, 878-879 of Table 6.

[0696] IX. Editing Methods/Methods of Treatment

[0697] The instant disclosure provides methods for the treatment of a subject diagnosed with a disease associated with or caused by a point mutation that may be corrected by a DNA editing base editor provided herein. For example, in some embodiments, a method is provided that comprises administering to a subject having such a disease, e.g., a cancer associated with a point mutation as described above, an effective amount of an adenosine deaminase base editor that corrects the point mutation or introduces a deactivating mutation into a disease-associated gene. In some embodiments, the disease is a proliferative disease. In some embodiments, the disease is a genetic disease. In some embodiments, the disease is a neoplastic disease. In some embodiments, the disease is a metabolic disease. In some embodiments, the disease is a lysosomal storage disease. Other diseases that may be treated by correcting a point mutation or introducing a deactivating mutation into a disease-associated gene will be known to those of skill in the art, and the disclosure is not limited in this respect.

[0698] In some embodiments, the deamination of the mutant A results in the codon encoding the wild-type amino acid. In some embodiments, the contacting is in vivo in a subject. In some embodiments, the subject has or has been diagnosed with a disease or disorder. In some embodiments, the disease or disorder is phenylketonuria, von Willebrand disease (vWD), a neoplastic disease associated with a mutant PTEN or BRCA1, or Li-Fraumeni syndrome. A list of exemplary diseases and disorders that may be treated using the base editors described herein is shown in Table 4. Table 4 includes the target gene, the mutation to be corrected, the related disease and the nucleotide sequence of the associated protospacer and PAM.

TABLE 4
List of exemplary diseases that may be treated using the base editors
described herein. The Adenine to be edited in the protospacer is indicated by underlining
and the PAM is indicated in bold.

| Target | | ATCC Cell | | |
|---|---|---|---|---|
| Gene | Mutation | Line | Disease | Protospacer and PAM |
| PTEN | Cys136Tyr | HTB-128 | Cancer | TATATGCATATTTATTACATCGG (SEQ ID NO: 3215) |
| | | | Predisposition | |
| PTEN | Arg233Ter | HTB-13 | Cancer | CCGTCATGTGGGTCCTGAATTGG (SEQ ID NO: 3216) |
| | | | Predisposition | |
| TP53 | Glu258Lys | HTB-65 | Cancer | ACACTGAAAGACTCCAGGTCAGG (SEQ ID NO: 3217) |
| | | | Predisposition | |
| BRCA1 | Gly1738Arg | NA | Cancer | GTCAGAAGAGATGTGGTCAATGG (SEQ ID NO: 88) |
| | | | Predisposition | |
| BRCA1 | 4097-1G > A | NA | Cancer | TTTAAAGTGAAGCAGCATCTGGG (SEQ ID NO: 3218); |
| | | | Predisposition | ATTTAAAGTGAAGCAGCATCTGG (SEQ ID NO: 3219) |
| PAH | Thr380Met | NA | Phenylketonuria | ACTCCATGACAGTGTAATTTTGG (SEQ ID NO: 3220) |
| VWF | Ser1285Phe | NA | von Willebrand | GCCTGGAGAAGCCATCCAGCAGG (SEQ ID NO: 3221) |
| | | | (Hemophilia) | |
| VWF | Arg2535Ter | NA | von Willebrand | CTCAGACACACTCATTGATGAGG (SEQ ID NO: 3222) |
| | | | (Hemophilia) | |
| TP53 | Arg175His | HCC1395 | Li-Fraumeni | GAGGCACTGCCCCCACCATGAGCG (SEQ ID NO: 3223) |
| | | | syndrome | |

[0699] Some embodiments provide methods for using the adenine base editors provided herein. In some embodiments, the base editors are used to introduce a point mutation into a nucleic acid by deaminating a target nucleobase, e.g., an A residue. In some embodiments, the deamination of the target nucleobase results in the correction of a genetic defect, e.g., in the correction of a point mutation that leads to a loss of function in a gene product. In some embodiments, the genetic defect is associated with a disease or disorder, e.g., a lysosomal storage disorder or a metabolic disease, such as, for example, type I diabetes. In some embodiments, the methods provided herein are used to introduce a deactivating point mutation into a gene or allele that encodes a gene product that is associated with a disease or disorder. For example, in some embodiments, methods are provided herein that employ a DNA editing base editor to introduce a deactivating point mutation into an oncogene (e.g., in the treatment of a proliferative disease). A deactivating mutation may, in some embodiments, generate a premature stop codon in a coding sequence, which results in the expression of a truncated gene product, e.g., a truncated protein lacking the function of the full-length protein.

[0700] In some embodiments, the purpose of the methods provided herein is to restore the function of a dysfunctional gene via genome editing. The nucleobase editing proteins provided herein can be validated for gene editing-based human therapeutics in vitro, e.g., by correcting a disease-associated mutation in human cell culture. It will be understood by the skilled artisan that the nucleobase editing proteins provided herein, e.g., the base editors comprising a nucleic acid programmable DNA binding protein (e.g., Cas9) and an adenosine deaminase domain may be used to correct any single point G to A or C to T mutation. In the first case, deamination of the mutant A to I corrects the mutation, and in the latter case, deamination of the A that is base-paired with the mutant T, followed by a round of replication, corrects the mutation. Exemplary point mutations that may be corrected are listed in Table 4.

[0701] The successful correction of point mutations in disease-associated genes and alleles opens up new strategies for gene correction with applications in therapeutics and basic research. Site-specific single-base modification systems like the disclosed fusions of a napDNAbp domain and an adenosine deaminase domain also have applications in “reverse” gene therapy, where certain gene functions are purposely suppressed or abolished. In these cases, site-specifically mutating residues that lead to inactivating mutations in a protein, or mutations that inhibit function of the protein may be used to abolish or inhibit protein function. Without wishing to be bound by any particular theory certain anemias, such as sickle cell anemia, may be treated by inducing expression of hemoglobin, such as fetal hemoglobin, which is typically silenced in adults. As one example, mutating −198T to C in the promoter driving HBG1 and HBG2 gene expression results in increased expression of HBG1 and HBG2. Another example, a class of disorders that results from a G to A mutation in a gene is iron storage disorders, where the HFE gene comprises a G to A mutation that results in expression of a C282Y mutant HFE protein. A list of additional exemplary diseases and disorders that may be treated using the base editors described herein is shown in Table 4, above.

[0702] The present disclosure provides methods for the treatment of additional diseases or disorders, e.g., diseases or disorders that are associated or caused by a point mutation that may be corrected by deaminase-mediated gene editing. Some such diseases are described herein, and additional suitable diseases that may be treated with the strategies and base editors provided herein will be apparent to those of skill in the art based on the instant disclosure. Exemplary suitable diseases and disorders are listed below. Exemplary suitable diseases and disorders include, without limitation: 2-methyl-3-hydroxybutyric aciduria; 3 beta-Hydroxysteroid dehydrogenase deficiency; 3-Methylglutaconic aciduria; 3-Oxo-5 alpha-steroid delta 4-dehydrogenase deficiency; 46,XY sex reversal, type 1, 3, and 5; 5-Oxoprolinase deficiency; 6-pyruvoyl-tetrahydropterin synthase deficiency; Aarskog syndrome; Aase syndrome; Achondrogenesis type 2; Achromatopsia 2 and 7; Acquired long QT syndrome; Acrocallosal syndrome, Schinzel type; Acrocapitofemoral dysplasia; Acrodysostosis 2, with or without hormone resistance; Acroerythrokeratoderma; Acromicric dysplasia; Acth-independent macronodular adrenal hyperplasia 2; Activated PI3K-delta syndrome; Acute intermittent porphyria; deficiency of Acyl-CoA dehydrogenase family, member 9; Adams-Oliver syndrome 5 and 6; Adenine phosphoribosyltransferase deficiency; Adenylate kinase deficiency; hemolytic anemia due to Adenylosuccinate lyase deficiency; Adolescent nephronophthisis; Renal-hepatic-pancreatic dysplasia; Meckel syndrome type 7; Adrenoleukodystrophy; Adult junctional epidermolysis bullosa; Epidermolysis bullosa, junctional, localisata variant; Adult neuronal ceroid lipofuscinosis; Adult neuronal ceroid lipofuscinosis; Adult onset ataxia with oculomotor apraxia; ADULT syndrome; Afibrinogenemia and congenital Afibrinogenemia; autosomal recessive Agammaglobulinemia 2; Age-related macular degeneration 3, 6, 11, and 12; Aicardi Goutieres syndromes 1, 4, and 5; Chilbain lupus 1; Alagille syndromes 1 and 2; Alexander disease; Alkaptonuria; Allan-Herndon-Dudley syndrome; Alopecia universalis congenital; Alpers encephalopathy; Alpha-1-antitrypsin deficiency; autosomal dominant, autosomal recessive, and X-linked recessive Alport syndromes; Alzheimer disease, familial, 3, with spastic paraparesis and apraxia; Alzheimer disease, types, 1, 3, and 4; hypocalcification type and hypomaturation type, IIA1 Amelogenesis imperfecta; Aminoacylase 1 deficiency; Amish infantile epilepsy syndrome; Amyloidogenic transthyretin amyloidosis; Amyloid Cardiomyopathy, Transthyretin-related; Cardiomyopathy; Amyotrophic lateral sclerosis types 1, 6, 15 (with or without frontotemporal dementia), 22 (with or without frontotemporal dementia), and 10; Frontotemporal dementia with TDP43 inclusions, TARDBP-related; Andermann syndrome; Andersen Tawil syndrome; Congenital long QT syndrome; Anemia, nonspherocytic hemolytic, due to G6PD deficiency; Angelman syndrome; Severe neonatal-onset encephalopathy with microcephaly; susceptibility to Autism, X-linked 3; Angiopathy, hereditary, with nephropathy, aneurysms, and muscle cramps; Angiotensin i-converting enzyme, benign serum increase; Aniridia, cerebellar ataxia, and mental retardation; Anonychia; Antithrombin III deficiency; Antley-Bixler syndrome with genital anomalies and disordered steroidogenesis; Aortic aneurysm, familial thoracic 4, 6, and 9; Thoracic aortic aneurysms and aortic dissections; Multisystemic smooth muscle dysfunction syndrome; Moyamoya disease 5; Aplastic anemia; Apparent mineralocorticoid excess; Arginase deficiency; Argininosuccinate lyase deficiency; Aromatase deficiency; Arrhythmogenic right ventricular cardiomyopathy types 5, 8, and 10; Primary familial hypertrophic cardiomyopathy; Arthrogryposis multiplex congenita, distal, X-linked; Arthrogryposis renal dysfunction cholestasis syndrome; Arthrogryposis, renal dysfunction, and cholestasis 2; Asparagine synthetase deficiency; Abnormality of neuronal migration; Ataxia with vitamin E deficiency; Ataxia, sensory, autosomal dominant; Ataxia-telangiectasia syndrome; Hereditary cancer-predisposing syndrome; Atransferrinemia; Atrial fibrillation, familial, 11, 12, 13, and 16; Atrial septal defects 2, 4, and 7 (with or without atrioventricular conduction defects); Atrial standstill 2; Atrioventricular septal defect 4; Atrophia bulborum hereditaria; ATR-X syndrome; Auriculocondylar syndrome 2; Autoimmune disease, multisystem, infantile-onset; Autoimmune lymphoproliferative syndrome, type 1a; Autosomal dominant hypohidrotic ectodermal dysplasia; Autosomal dominant progressive external ophthalmoplegia with mitochondrial DNA deletions 1 and 3; Autosomal dominant torsion dystonia 4; Autosomal recessive centronuclear myopathy; Autosomal recessive congenital ichthyosis 1, 2, 3, 4A, and 4B; Autosomal recessive cutis laxa type IA and 1B; Autosomal recessive hypohidrotic ectodermal dysplasia syndrome; Ectodermal dysplasia 11b; hypohidrotic/hair/tooth type, autosomal recessive; Autosomal recessive hypophosphatemic bone disease; Axenfeld-Rieger syndrome type 3; Bainbridge-Ropers syndrome; Bannayan-Riley-Ruvalcaba syndrome; PTEN hamartoma tumor syndrome; Baraitser-Winter syndromes 1 and 2; Barakat syndrome; Bardet-Biedl syndromes 1, 11, 16, and 19; Bare lymphocyte syndrome type 2, complementation group E; Bartter syndrome antenatal type 2; Bartter syndrome types 3, 3 with hypocalciuria, and 4; Basal ganglia calcification, idiopathic, 4; Beaded hair; Benign familial hematuria; Benign familial neonatal seizures 1 and 2; Seizures, benign familial neonatal, 1, and/or myokymia; Seizures, Early infantile epileptic encephalopathy 7; Benign familial neonatal-infantile seizures; Benign hereditary chorea; Benign scapuloperoneal muscular dystrophy with cardiomyopathy; Bernard-Soulier syndrome, types A1 and A2 (autosomal dominant); Bestrophinopathy, autosomal recessive; beta Thalassemia; Bethlem myopathy and Bethlem myopathy 2; Bietti crystalline corneoretinal dystrophy; Bile acid synthesis defect, congenital, 2; Biotinidase deficiency; Birk Barel mental retardation dysmorphism syndrome; Blepharophimosis, ptosis, and epicanthus inversus; Bloom syndrome; Borjeson-Forssman-Lehmann syndrome; Boucher Neuhauser syndrome; Brachydactyly types A1 and A2; Brachydactyly with hypertension; Brain small vessel disease with hemorrhage; Branched-chain ketoacid dehydrogenase kinase deficiency; Branchiootic syndromes 2 and 3; Breast cancer, early-onset; Breast-ovarian cancer, familial 1, 2, and 4; Brittle cornea syndrome 2; Brody myopathy; Bronchiectasis with or without elevated sweat chloride 3; Brown-Vialetto-Van laere syndrome and Brown-Vialetto-Van Laere syndrome 2; Brugada syndrome; Brugada syndrome 1; Ventricular fibrillation; Paroxysmal familial ventricular fibrillation; Brugada syndrome and Brugada syndrome 4; Long QT syndrome; Sudden cardiac death; Bull eye macular dystrophy; Stargardt disease 4; Cone-rod dystrophy 12; Bullous ichthyosiform erythroderma; Burn-Mckeown syndrome; Candidiasis, familial, 2, 5, 6, and 8; Carbohydrate-deficient glycoprotein syndrome type I and II; Carbonic anhydrase VA deficiency, hyperammonemia due to; Carcinoma of colon; Cardiac arrhythmia; Long QT syndrome, LQT1 subtype; Cardioencephalomyopathy, fatal infantile, due to cytochrome c oxidase deficiency; Cardiofaciocutaneous syndrome; Cardiomyopathy; Danon disease; Hypertrophic cardiomyopathy; Left ventricular noncompaction cardiomyopathy; Carnevale syndrome; Carney complex, type 1; Carnitine acylcarnitine translocase deficiency; Carnitine palmitoyltransferase I, II, II (late onset), and II (infantile) deficiency; Cataract 1, 4, autosomal dominant, autosomal dominant, multiple types, with microcornea, coppock-like, juvenile, with microcornea and glucosuria, and nuclear diffuse nonprogressive; Catecholaminergic polymorphic ventricular tachycardia; Caudal regression syndrome; Cd8 deficiency, familial; Central core disease; Centromeric instability of chromosomes 1, 9 and 16 and immunodeficiency; Cerebellar ataxia infantile with progressive external ophthalmoplegi and Cerebellar ataxia, mental retardation, and dysequilibrium syndrome 2; Cerebral amyloid angiopathy, APP-related; Cerebral autosomal dominant and recessive arteriopathy with subcortical infarcts and leukoencephalopathy; Cerebral cavernous malformations 2; Cerebrooculofacioskeletal syndrome 2; Cerebro-oculo-facio-skeletal syndrome; Cerebroretinal microangiopathy with calcifications and cysts; Ceroid lipofuscinosis neuronal 2, 6, 7, and 10; Ch\xc3\xa9diak-Higashi syndrome, Chediak-Higashi syndrome, adult type; Charcot-Marie-Tooth disease types 1B, 2B2, 2C, 2F, 2I, 2U (axonal), 1C (demyelinating), dominant intermediate C, recessive intermediate A, 2A2, 4C, 4D, 4H, IF, IVF, and X; Scapuloperoneal spinal muscular atrophy; Distal spinal muscular atrophy, congenital nonprogressive; Spinal muscular atrophy, distal, autosomal recessive, 5; CHARGE association; Childhood hypophosphatasia; Adult hypophosphatasia; Cholecystitis; Progressive familial intrahepatic cholestasis 3; Cholestasis, intrahepatic, of pregnancy 3; Cholestanol storage disease; Cholesterol monooxygenase (side-chain cleaving) deficiency; Chondrodysplasia Blomstrand type; Chondrodysplasia punctata 1, X-linked recessive and 2 X-linked dominant; CHOPS syndrome; Chronic granulomatous disease, autosomal recessive cytochrome b-positive, types 1 and 2; Chudley-McCullough syndrome; Ciliary dyskinesia, primary, 7, 11, 15, 20 and 22; Citrullinemia type I; Citrullinemia type I and II; Cleidocranial dysostosis; C-like syndrome; Cockayne syndrome type A, Coenzyme Q10 deficiency, primary 1, 4, and 7; Coffin Siris/Intellectual Disability; Coffin-Lowry syndrome; Cohen syndrome, Cold-induced sweating syndrome 1; COLE-CARPENTER SYNDROME 2; Combined cellular and humoral immune defects with granulomas; Combined d-2- and 1-2-hydroxyglutaric aciduria; Combined malonic and methylmalonic aciduria; Combined oxidative phosphorylation deficiencies 1, 3, 4, 12, 15, and 25; Combined partial and complete 17-alpha-hydroxylase/17,20-lyase deficiency; Common variable immunodeficiency 9; Complement component 4, partial deficiency of, due to dysfunctional c1 inhibitor; Complement factor B deficiency; Cone monochromatism; Cone-rod dystrophy 2 and 6; Cone-rod dystrophy amelogenesis imperfecta; Congenital adrenal hyperplasia and Congenital adrenal hypoplasia, X-linked; Congenital amegakaryocytic thrombocytopenia; Congenital aniridia; Congenital central hypoventilation; Hirschsprung disease 3; Congenital contractural arachnodactyly; Congenital contractures of the limbs and face, hypotonia, and developmental delay; Congenital disorder of glycosylation types 1B, 1D, 1G, 1H, 1J, 1K, 1N, 1P, 2C, 2J, 2K, IIm; Congenital dyserythropoietic anemia, type I and II; Congenital ectodermal dysplasia of face; Congenital erythropoietic porphyria; Congenital generalized lipodystrophy type 2; Congenital heart disease, multiple types, 2; Congenital heart disease; Interrupted aortic arch; Congenital lipomatous overgrowth, vascular malformations, and epidermal nevi; Non-small cell lung cancer; Neoplasm of ovary; Cardiac conduction defect, nonspecific; Congenital microvillous atrophy; Congenital muscular dystrophy; Congenital muscular dystrophy due to partial LAMA2 deficiency; Congenital muscular dystrophy-dystroglycanopathy with brain and eye anomalies, types A2, A7, A8, A11, and A14; Congenital muscular dystrophy-dystroglycanopathy with mental retardation, types B2, B3, B5, and B15; Congenital muscular dystrophy-dystroglycanopathy without mental retardation, type B5; Congenital muscular hypertrophy-cerebral syndrome; Congenital myasthenic syndrome, acetazolamide-responsive; Congenital myopathy with fiber type disproportion; Congenital ocular coloboma; Congenital stationary night blindness, type 1A, 1B, 1C, 1E, 1F, and 2A; Coproporphyria; Cornea plana 2; Corneal dystrophy, Fuchs endothelial, 4; Corneal endothelial dystrophy type 2; Corneal fragility keratoglobus, blue sclerae and joint hypermobility; Cornelia de Lange syndromes 1 and 5; Coronary artery disease, autosomal dominant 2; Coronary heart disease; Hyperalphalipoproteinemia 2; Cortical dysplasia, complex, with other brain malformations 5 and 6; Cortical malformations, occipital; Corticosteroid-binding globulin deficiency; Corticosterone methyloxidase type 2 deficiency; Costello syndrome; Cowden syndrome 1; Coxa plana; Craniodiaphyseal dysplasia, autosomal dominant; Craniosynostosis 1 and 4; Craniosynostosis and dental anomalies; Creatine deficiency, X-linked; Crouzon syndrome; Cryptophthalmos syndrome; Cryptorchidism, unilateral or bilateral; Cushing symphalangism; Cutaneous malignant melanoma 1; Cutis laxa with osteodystrophy and with severe pulmonary, gastrointestinal, and urinary abnormalities; Cyanosis, transient neonatal and atypical nephropathic; Cystic fibrosis; Cystinuria; Cytochrome c oxidase i deficiency; Cytochrome-c oxidase deficiency; D-2-hydroxyglutaric aciduria 2; Darier disease, segmental; Deafness with labyrinthine aplasia microtia and microdontia (LAMM); Deafness, autosomal dominant 3a, 4, 12, 13, 15, autosomal dominant nonsyndromic sensorineural 17, 20, and 65; Deafness, autosomal recessive 1A, 2, 3, 6, 8, 9, 12, 15, 16, 18b, 22, 28, 31, 44, 49, 63, 77, 86, and 89; Deafness, cochlear, with myopia and intellectual impairment, without vestibular involvement, autosomal dominant, X-linked 2; Deficiency of 2-methylbutyryl-CoA dehydrogenase; Deficiency of 3-hydroxyacyl-CoA dehydrogenase; Deficiency of alpha-mannosidase; Deficiency of aromatic-L-amino-acid decarboxylase; Deficiency of bisphosphoglycerate mutase; Deficiency of butyryl-CoA dehydrogenase; Deficiency of ferroxidase; Deficiency of galactokinase; Deficiency of guanidinoacetate methyltransferase; Deficiency of hyaluronoglucosaminidase; Deficiency of ribose-5-phosphate isomerase; Deficiency of steroid 11-beta-monooxygenase; Deficiency of UDPglucose-hexose-1-phosphate uridylyltransferase; Deficiency of xanthine oxidase; Dejerine-Sottas disease; Charcot-Marie-Tooth disease, types ID and IVF; Dejerine-Sottas syndrome, autosomal dominant; Dendritic cell, monocyte, B lymphocyte, and natural killer lymphocyte deficiency; Desbuquois dysplasia 2; Desbuquois syndrome; DFNA 2 Nonsyndromic Hearing Loss; Diabetes mellitus and insipidus with optic atrophy and deafness; Diabetes mellitus, type 2, and insulin-dependent, 20; Diamond-Blackfan anemia 1, 5, 8, and 10; Diarrhea 3 (secretory sodium, congenital, syndromic) and 5 (with tufting enteropathy, congenital); Dicarboxylic aminoaciduria; Diffuse palmoplantar keratoderma, Bothnian type; Digitorenocerebral syndrome; Dihydropteridine reductase deficiency; Dilated cardiomyopathy 1A, 1AA, 1C, 1G, 1BB, 1DD, 1FF, 1HH, 1I, 1KK, 1N, 1S, 1Y, and 3B; Left ventricular noncompaction 3; Disordered steroidogenesis due to cytochrome p450 oxidoreductase deficiency; Distal arthrogryposis type 2B; Distal hereditary motor neuronopathy type 2B; Distal myopathy Markesbery-Griggs type; Distal spinal muscular atrophy, X-linked 3; Distichiasis-lymphedema syndrome; Dominant dystrophic epidermolysis bullosa with absence of skin; Dominant hereditary optic atrophy; Donnai Barrow syndrome; Dopamine beta hydroxylase deficiency; Dopamine receptor d2, reduced brain density of, Dowling-degos disease 4; Doyne honeycomb retinal dystrophy; Malattia leventinese; Duane syndrome type 2; Dubin-Johnson syndrome; Duchenne muscular dystrophy; Becker muscular dystrophy; Dysfibrinogenemia; Dyskeratosis congenita autosomal dominant and autosomal dominant, 3; Dyskeratosis congenita, autosomal recessive, 1, 3, 4, and 5; Dyskeratosis congenita X-linked; Dyskinesia, familial, with facial myokymia; Dysplasminogenemia; Dystonia 2 (torsion, autosomal recessive), 3 (torsion, X-linked), 5 (Dopa-responsive type), 10, 12, 16, 25, 26 (Myoclonic); Seizures, benign familial infantile, 2; Early infantile epileptic encephalopathy 2, 4, 7, 9, 10, 11, 13, and 14; Atypical Rett syndrome; Early T cell progenitor acute lymphoblastic leukemia; Ectodermal dysplasia skin fragility syndrome; Ectodermal dysplasia-syndactyly syndrome 1; Ectopia lentis, isolated autosomal recessive and dominant; Ectrodactyly, ectodermal dysplasia, and cleft lip/palate syndrome 3; Ehlers-Danlos syndrome type 7 (autosomal recessive), classic type, type 2 (progeroid), hydroxylysine-deficient, type 4, type 4 variant, and due to tenascin-X deficiency; Eichsfeld type congenital muscular dystrophy; Endocrine-cerebroosteodysplasia; Enhanced s-cone syndrome; Enlarged vestibular aqueduct syndrome; Enterokinase deficiency; Epidermodysplasia verruciformis; Epidermolysa bullosa simplex and limb girdle muscular dystrophy, simplex with mottled pigmentation, simplex with pyloric atresia, simplex, autosomal recessive, and with pyloric atresia; Epidermolytic palmoplantar keratoderma; Familial febrile seizures 8; Epilepsy, childhood absence 2, 12 (idiopathic generalized, susceptibility to) 5 (nocturnal frontal lobe), nocturnal frontal lobe type 1, partial, with variable foci, progressive myoclonic 3, and X-linked, with variable learning disabilities and behavior disorders; Epileptic encephalopathy, childhood-onset, early infantile, 1, 19, 23, 25, 30, and 32; Epiphyseal dysplasia, multiple, with myopia and conductive deafness; Episodic ataxia type 2; Episodic pain syndrome, familial, 3; Epstein syndrome; Fechtner syndrome; Erythropoietic protoporphyria; Estrogen resistance; Exudative vitreoretinopathy 6; Fabry disease and Fabry disease, cardiac variant; Factor H, VII, X, v and factor viii, combined deficiency of 2, xiii, a subunit, deficiency; Familial adenomatous polyposis 1 and 3; Familial amyloid nephropathy with urticaria and deafness; Familial cold urticarial; Familial aplasia of the vermis; Familial benign pemphigus; Familial cancer of breast; Breast cancer, susceptibility to; Osteosarcoma; Pancreatic cancer 3; Familial cardiomyopathy; Familial cold autoinflammatory syndrome 2; Familial colorectal cancer; Familial exudative vitreoretinopathy, X-linked; Familial hemiplegic migraine types 1 and 2; Familial hypercholesterolemia; Familial hypertrophic cardiomyopathy 1, 2, 3, 4, 7, 10, 23 and 24; Familial hypokalemia-hypomagnesemia; Familial hypoplastic, glomerulocystic kidney; Familial infantile myasthenia; Familial juvenile gout; Familial Mediterranean fever and Familial mediterranean fever, autosomal dominant; Familial porencephaly; Familial porphyria cutanea tarda; Familial pulmonary capillary hemangiomatosis; Familial renal glucosuria; Familial renal hypouricemia; Familial restrictive cardiomyopathy 1; Familial type 1 and 3 hyperlipoproteinemia; Fanconi anemia, complementation group E, I, N, and 0; Fanconi-Bickel syndrome; Favism, susceptibility to; Febrile seizures, familial, 11; Feingold syndrome 1; Fetal hemoglobin quantitative trait locus 1; FG syndrome and FG syndrome 4; Fibrosis of extraocular muscles, congenital, 1, 2, 3a (with or without extraocular involvement), 3b; Fish-eye disease; Fleck corneal dystrophy; Floating-Harbor syndrome; Focal epilepsy with speech disorder with or without mental retardation; Focal segmental glomerulosclerosis 5; Forebrain defects; Frank Ter Haar syndrome; Borrone Di Rocco Crovato syndrome; Frasier syndrome; Wilms tumor 1; Freeman-Sheldon syndrome; Frontometaphyseal dysplasia land 3; Frontotemporal dementia; Frontotemporal dementia and/or amyotrophic lateral sclerosis 3 and 4; Frontotemporal Dementia Chromosome 3-Linked and Frontotemporal dementia ubiquitin-positive; Fructose-biphosphatase deficiency; Fuhrmann syndrome; Gamma-aminobutyric acid transaminase deficiency; Gamstorp-Wohlfart syndrome; Gaucher disease type 1 and Subacute neuronopathic; Gaze palsy, familial horizontal, with progressive scoliosis; Generalized dominant dystrophic epidermolysis bullosa; Generalized epilepsy with febrile seizures plus 3, type 1, type 2; Epileptic encephalopathy Lennox-Gastaut type; Giant axonal neuropathy; Glanzmann thrombasthenia; Glaucoma 1, open angle, e, F, and G; Glaucoma 3, primary congenital, d; Glaucoma, congenital and Glaucoma, congenital, Coloboma; Glaucoma, primary open angle, juvenile-onset; Glioma susceptibility 1; Glucose transporter type 1 deficiency syndrome; Glucose-6-phosphate transport defect; GLUT1 deficiency syndrome 2; Epilepsy, idiopathic generalized, susceptibility to, 12; Glutamate formiminotransferase deficiency; Glutaric acidemia IIA and IIB; Glutaric aciduria, type 1; Gluthathione synthetase deficiency; Glycogen storage disease 0 (muscle), II (adult form), IXa2, IXc, type 1A; type II, type IV, IV (combined hepatic and myopathic), type V, and type VI; Goldmann-Favre syndrome; Gordon syndrome; Gorlin syndrome; Holoprosencephaly sequence; Holoprosencephaly 7; Granulomatous disease, chronic, X-linked, variant; Granulosa cell tumor of the ovary; Gray platelet syndrome; Griscelli syndrome type 3; Groenouw corneal dystrophy type I; Growth and mental retardation, mandibulofacial dysostosis, microcephaly, and cleft palate; Growth hormone deficiency with pituitary anomalies; Growth hormone insensitivity with immunodeficiency; GTP cyclohydrolase I deficiency; Hajdu-Cheney syndrome; Hand foot uterus syndrome; Hearing impairment; Hemangioma, capillary infantile; Hematologic neoplasm; Hemochromatosis type 1, 2B, and 3; Microvascular complications of diabetes 7; Transferrin serum level quantitative trait locus 2; Hemoglobin H disease, nondeletional; Hemolytic anemia, nonspherocytic, due to glucose phosphate isomerase deficiency; Hemophagocytic lymphohistiocytosis, familial, 2; Hemophagocytic lymphohistiocytosis, familial, 3; Heparin cofactor II deficiency; Hereditary acrodermatitis enteropathica; Hereditary breast and ovarian cancer syndrome; Ataxia-telangiectasia-like disorder; Hereditary diffuse gastric cancer; Hereditary diffuse leukoencephalopathy with spheroids; Hereditary factors II, IX, VIII deficiency disease; Hereditary hemorrhagic telangiectasia type 2; Hereditary insensitivity to pain with anhidrosis; Hereditary lymphedema type I; Hereditary motor and sensory neuropathy with optic atrophy; Hereditary myopathy with early respiratory failure; Hereditary neuralgic amyotrophy; Hereditary Nonpolyposis Colorectal Neoplasms; Lynch syndrome I and II; Hereditary pancreatitis; Pancreatitis, chronic, susceptibility to; Hereditary sensory and autonomic neuropathy type IIB amd IIA; Hereditary sideroblastic anemia; Hermansky-Pudlak syndrome 1, 3, 4, and 6; Heterotaxy, visceral, 2, 4, and 6, autosomal; Heterotaxy, visceral, X-linked; Heterotopia; Histiocytic medullary reticulosis; Histiocytosis-lymphadenopathy plus syndrome; Holocarboxylase synthetase deficiency; Holoprosencephaly 2, 3, 7, and 9; Holt-Oram syndrome; Homocysteinemia due to MTHFR deficiency, CBS deficiency, and Homocystinuria, pyridoxine-responsive; Homocystinuria-Megaloblastic anemia due to defect in cobalamin metabolism, cblE complementation type; Howel-Evans syndrome; Hurler syndrome; Hutchinson-Gilford syndrome; Hydrocephalus; Hyperammonemia, type III; Hypercholesterolaemia and Hypercholesterolemia, autosomal recessive; Hyperekplexia 2 and Hyperekplexia hereditary; Hyperferritinemia cataract syndrome; Hyperglycinuria; Hyperimmunoglobulin D with periodic fever; Mevalonic aciduria; Hyperimmunoglobulin E syndrome; Hyperinsulinemic hypoglycemia familial 3, 4, and 5; Hyperinsulinism-hyperammonemia syndrome; Hyperlysinemia; Hypermanganesemia with dystonia, polycythemia and cirrhosis; Hyperornithinemia-hyperammonemia-homocitrullinuria syndrome; Hyperparathyroidism 1 and 2; Hyperparathyroidism, neonatal severe; Hyperphenylalaninemia, bh4-deficient, a, due to partial pts deficiency, BH4-deficient, D, and non-pku; Hyperphosphatasia with mental retardation syndrome 2, 3, and 4; Hypertrichotic osteochondrodysplasia; Hypobetalipoproteinemia, familial, associated with apob32; Hypocalcemia, autosomal dominant 1; Hypocalciuric hypercalcemia, familial, types 1 and 3; Hypochondrogenesis; Hypochromic microcytic anemia with iron overload; Hypoglycemia with deficiency of glycogen synthetase in the liver; Hypogonadotropic hypogonadism 11 with or without anosmia; Hypohidrotic ectodermal dysplasia with immune deficiency; Hypohidrotic X-linked ectodermal dysplasia; Hypokalemic periodic paralysis 1 and 2; Hypomagnesemia 1, intestinal; Hypomagnesemia, seizures, and mental retardation; Hypomyelinating leukodystrophy 7; Hypoplastic left heart syndrome; Atrioventricular septal defect and common atrioventricular junction; Hypospadias 1 and 2, X-linked; Hypothyroidism, congenital, nongoitrous, 1; Hypotrichosis 8 and 12; Hypotrichosis-lymphedema-telangiectasia syndrome; I blood group system; Ichthyosis bullosa of Siemens; Ichthyosis exfoliativa; Ichthyosis prematurity syndrome; Idiopathic basal ganglia calcification 5; Idiopathic fibrosing alveolitis, chronic form; Dyskeratosis congenita, autosomal dominant, 2 and 5; Idiopathic hypercalcemia of infancy; Immune dysfunction with T-cell inactivation due to calcium entry defect 2; Immunodeficiency 15, 16, 19, 30, 31C, 38, 40, 8, due to defect in cd3-zeta, with hyper IgM type 1 and 2, and X-Linked, with magnesium defect, Epstein-Barr virus infection, and neoplasia; Immunodeficiency-centromeric instability-facial anomalies syndrome 2; Inclusion body myopathy 2 and 3; Nonaka myopathy; Infantile convulsions and paroxysmal choreoathetosis, familial; Infantile cortical hyperostosis; Infantile GM1 gangliosidosis; Infantile hypophosphatasia; Infantile nephronophthisis; Infantile nystagmus, X-linked; Infantile Parkinsonism-dystonia; Infertility associated with multi-tailed spermatozoa and excessive DNA; Insulin resistance; Insulin-resistant diabetes mellitus and acanthosis nigricans; Insulin-dependent diabetes mellitus secretory diarrhea syndrome; Interstitial nephritis, karyomegalic; Intrauterine growth retardation, metaphyseal dysplasia, adrenal hypoplasia congenita, and genital anomalies; Iodotyrosyl coupling defect; IRAK4 deficiency; Iridogoniodysgenesis dominant type and type 1; Iron accumulation in brain; Ischiopatellar dysplasia; Islet cell hyperplasia; Isolated 17,20-lyase deficiency; Isolated lutropin deficiency; Isovaleryl-CoA dehydrogenase deficiency; Jankovic Rivera syndrome; Jervell and Lange-Nielsen syndrome 2; Joubert syndrome 1, 6, 7, 9/15 (digenic), 14, 16, and 17, and Orofaciodigital syndrome xiv; Junctional epidermolysis bullosa gravis of Herlitz; Juvenile GM>1<gangliosidosis; Juvenile polyposis syndrome; Juvenile polyposis/hereditary hemorrhagic telangiectasia syndrome; Juvenile retinoschisis; Kabuki make-up syndrome; Kallmann syndrome 1, 2, and 6; Delayed puberty; Kanzaki disease; Karak syndrome; Kartagener syndrome; Kenny-Caffey syndrome type 2; Keppen-Lubinsky syndrome; Keratoconus 1; Keratosis follicularis; Keratosis palmoplantaris striata 1; Kindler syndrome; L-2-hydroxyglutaric aciduria; Larsen syndrome, dominant type; Lattice corneal dystrophy Type III; Leber amaurosis; Zellweger syndrome; Peroxisome biogenesis disorders; Zellweger syndrome spectrum; Leber congenital amaurosis 11, 12, 13, 16, 4, 7, and 9; Leber optic atrophy; Aminoglycoside-induced deafness; Deafness, nonsyndromic sensorineural, mitochondrial; Left ventricular noncompaction 5; Left-right axis malformations; Leigh disease; Mitochondrial short-chain Enoyl-CoA Hydratase 1 deficiency; Leigh syndrome due to mitochondrial complex I deficiency; Leiner disease; Leri Weill dyschondrosteosis; Lethal congenital contracture syndrome 6; Leukocyte adhesion deficiency type I and III; Leukodystrophy, Hypomyelinating, 11 and 6; Leukoencephalopathy with ataxia, with Brainstem and Spinal Cord Involvement and Lactate Elevation, with vanishing white matter, and progressive, with ovarian failure; Leukonychia totalis; Lewy body dementia; Lichtenstein-Knorr Syndrome; Li-Fraumeni syndrome 1; Lig4 syndrome; Limb-girdle muscular dystrophy, type 1B, 2A, 2B, 2D, C1, C5, C9, C14; Congenital muscular dystrophy-dystroglycanopathy with brain and eye anomalies, type A14 and B14; Lipase deficiency combined; Lipid proteinosis; Lipodystrophy, familial partial, type 2 and 3; Lissencephaly 1, 2 (X-linked), 3, 6 (with microcephaly), X-linked; Subcortical laminar heterotopia, X-linked; Liver failure acute infantile; Loeys-Dietz syndrome 1, 2, 3; Long QT syndrome 1, 2, 2/9, 2/5, (digenic), 3, 5 and 5, acquired, susceptibility to; Lung cancer; Lymphedema, hereditary, id; Lymphedema, primary, with myelodysplasia; Lymphoproliferative syndrome 1, 1 (X-linked), and 2; Lysosomal acid lipase deficiency; Macrocephaly, macrosomia, facial dysmorphism syndrome; Macular dystrophy, vitelliform, adult-onset; Malignant hyperthermia susceptibility type 1; Malignant lymphoma, non-Hodgkin; Malignant melanoma; Malignant tumor of prostate; Mandibuloacral dysostosis; Mandibuloacral dysplasia with type A or B lipodystrophy, atypical; Mandibulofacial dysostosis, Treacher Collins type, autosomal recessive; Mannose-binding protein deficiency; Maple syrup urine disease type 1A and type 3; Marden Walker like syndrome; Marfan syndrome; Marinesco-Sj\xc3\xb6gren syndrome; Martsolf syndrome; Maturity-onset diabetes of the young, type 1, type 2, type 11, type 3, and type 9; May-Hegglin anomaly; MYH9 related disorders; Sebastian syndrome; McCune-Albright syndrome; Somatotroph adenoma; Sex cord-stromal tumor; Cushing syndrome; McKusick Kaufman syndrome; McLeod neuroacanthocytosis syndrome; Meckel-Gruber syndrome; Medium-chain acyl-coenzyme A dehydrogenase deficiency; Medulloblastoma; Megalencephalic leukoencephalopathy with subcortical cysts land 2a; Megalencephaly cutis marmorata telangiectatica congenital; PIK3CA Related Overgrowth Spectrum; Megalencephaly-polymicrogyria-polydactyly-hydrocephalus syndrome 2; Megaloblastic anemia, thiamine-responsive, with diabetes mellitus and sensorineural deafness; Meier-Gorlin syndromes land 4; Melnick-Needles syndrome; Meningioma; Mental retardation, X-linked, 3, 21, 30, and 72; Mental retardation and microcephaly with pontine and cerebellar hypoplasia; Mental retardation X-linked syndromic 5; Mental retardation, anterior maxillary protrusion, and strabismus; Mental retardation, autosomal dominant 12, 13, 15, 24, 3, 30, 4, 5, 6, and 9; Mental retardation, autosomal recessive 15, 44, 46, and 5; Mental retardation, stereotypic movements, epilepsy, and/or cerebral malformations; Mental retardation, syndromic, Claes-Jensen type, X-linked; Mental retardation, X-linked, nonspecific, syndromic, Hedera type, and syndromic, wu type; Merosin deficient congenital muscular dystrophy; Metachromatic leukodystrophy juvenile, late infantile, and adult types; Metachromatic leukodystrophy; Metatrophic dysplasia; Methemoglobinemia types I and 2; Methionine adenosyltransferase deficiency, autosomal dominant; Methylmalonic acidemia with homocystinuria, Methylmalonic aciduria cblB type, Methylmalonic aciduria due to methylmalonyl-CoA mutase deficiency; METHYLMALONIC ACIDURIA, mut(0) TYPE; Microcephalic osteodysplastic primordial dwarfism type 2; Microcephaly with or without chorioretinopathy, lymphedema, or mental retardation; Microcephaly, hiatal hernia and nephrotic syndrome; Microcephaly; Hypoplasia of the corpus callosum; Spastic paraplegia 50, autosomal recessive; Global developmental delay; CNS hypomyelination; Brain atrophy; Microcephaly, normal intelligence and immunodeficiency; Microcephaly-capillary malformation syndrome; Microcytic anemia; Microphthalmia syndromic 5, 7, and 9; Microphthalmia, isolated 3, 5, 6, 8, and with coloboma 6; Microspherophakia; Migraine, familial basilar; Miller syndrome; Minicore myopathy with external ophthalmoplegia; Myopathy, congenital with cores; Mitchell-Riley syndrome; mitochondrial 3-hydroxy-3-methylglutaryl-CoA synthase deficiency; Mitochondrial complex I, II, III, III (nuclear type 2, 4, or 8) deficiency; Mitochondrial DNA depletion syndrome 11, 12 (cardiomyopathic type), 2, 4B (MNGIE type), 8B (MNGIE type); Mitochondrial DNA-depletion syndrome 3 and 7, hepatocerebral types, and 13 (encephalomyopathic type); Mitochondrial phosphate carrier and pyruvate carrier deficiency; Mitochondrial trifunctional protein deficiency; Long-chain 3-hydroxyacyl-CoA dehydrogenase deficiency; Miyoshi muscular dystrophy 1; Myopathy, distal, with anterior tibial onset; Mohr-Tranebjaerg syndrome; Molybdenum cofactor deficiency, complementation group A; Mowat-Wilson syndrome; Mucolipidosis III Gamma; Mucopolysaccharidosis type VI, type VI (severe), and type VII; Mucopolysaccharidosis, MPS-I-H/S, MPS-II, MPS-III-A, MPS-III-B, MPS-III-C, MPS-IV-A, MPS-IV-B; Retinitis Pigmentosa 73; Gangliosidosis GM1 type1 (with cardiac involvement) 3; Multicentric osteolysis nephropathy; Multicentric osteolysis, nodulosis and arthropathy; Multiple congenital anomalies; Atrial septal defect 2; Multiple congenital anomalies-hypotonia-seizures syndrome 3; Multiple Cutaneous and Mucosal Venous Malformations; Multiple endocrine neoplasia, types land 4; Multiple epiphyseal dysplasia 5 or Dominant; Multiple gastrointestinal atresias; Multiple pterygium syndrome Escobar type; Multiple sulfatase deficiency; Multiple synostoses syndrome 3; Muscle AMP deaminase deficiency; Muscle eye brain disease; Muscular dystrophy, congenital, megaconial type; Myasthenia, familial infantile, 1; Myasthenic Syndrome, Congenital, 11, associated with acetylcholine receptor deficiency; Myasthenic Syndrome, Congenital, 17, 2A (slow-channel), 4B (fast-channel), and without tubular aggregates; Myeloperoxidase deficiency; MYH-associated polyposis; Endometrial carcinoma; Myocardial infarction 1; Myoclonic dystonia; Myoclonic-Atonic Epilepsy; Myoclonus with epilepsy with ragged red fibers; Myofibrillar myopathy 1 and ZASP-related; Myoglobinuria, acute recurrent, autosomal recessive; Myoneural gastrointestinal encephalopathy syndrome; Cerebellar ataxia infantile with progressive external ophthalmoplegia; Mitochondrial DNA depletion syndrome 4B, MNGIE type; Myopathy, centronuclear, 1, congenital, with excess of muscle spindles, distal, 1, lactic acidosis, and sideroblastic anemia 1, mitochondrial progressive with congenital cataract, hearing loss, and developmental delay, and tubular aggregate, 2; Myopia 6; Myosclerosis, autosomal recessive; Myotonia congenital; Congenital myotonia, autosomal dominant and recessive forms; Nail-patella syndrome; Nance-Horan syndrome; Nanophthalmos 2; Navajo neurohepatopathy; Nemaline myopathy 3 and 9; Neonatal hypotonia; Intellectual disability; Seizures; Delayed speech and language development; Mental retardation, autosomal dominant 31; Neonatal intrahepatic cholestasis caused by citrin deficiency; Nephrogenic diabetes insipidus, Nephrogenic diabetes insipidus, X-linked; Nephrolithiasis/osteoporosis, hypophosphatemic, 2; Nephronophthisis 13, 15 and 4; Infertility; Cerebello-oculo-renal syndrome (nephronophthisis, oculomotor apraxia and cerebellar abnormalities); Nephrotic syndrome, type 3, type 5, with or without ocular abnormalities, type 7, and type 9; Nestor-Guillermo progeria syndrome; Neu-Laxova syndrome 1; Neurodegeneration with brain iron accumulation 4 and 6; Neuroferritinopathy; Neurofibromatosis, type land type 2; Neurofibrosarcoma; Neurohypophyseal diabetes insipidus; Neuropathy, Hereditary Sensory, Type IC; Neutral 1 amino acid transport defect; Neutral lipid storage disease with myopathy; Neutrophil immunodeficiency syndrome; Nicolaides-Baraitser syndrome; Niemann-Pick disease type C1, C2, type A, and type C1, adult form; Non-ketotic hyperglycinemia; Noonan syndrome 1 and 4, LEOPARD syndrome 1; Noonan syndrome-like disorder with or without juvenile myelomonocytic leukemia; Normokalemic periodic paralysis, potassium-sensitive; Norum disease; Epilepsy, Hearing Loss, And Mental Retardation Syndrome; Mental Retardation, X-Linked 102 and syndromic 13; Obesity; Ocular albinism, type I; Oculocutaneous albinism type 1B, type 3, and type 4; Oculodentodigital dysplasia; Odontohypophosphatasia; Odontotrichomelic syndrome; Oguchi disease; Oligodontia-colorectal cancer syndrome; Opitz G/BBB syndrome; Optic atrophy 9; Oral-facial-digital syndrome; Ornithine aminotransferase deficiency; Orofacial cleft 11 and 7, Cleft lip/palate-ectodermal dysplasia syndrome; Orstavik Lindemann Solberg syndrome; Osteoarthritis with mild chondrodysplasia; Osteochondritis dissecans; Osteogenesis imperfecta type 12, type 5, type 7, type 8, type I, type III, with normal sclerae, dominant form, recessive perinatal lethal; Osteopathia striata with cranial sclerosis; Osteopetrosis autosomal dominant type 1 and 2, recessive 4, recessive 1, recessive 6; Osteoporosis with pseudoglioma; Oto-palato-digital syndrome, types I and II; Ovarian dysgenesis 1; Ovarioleukodystrophy; Pachyonychia congenita 4 and type 2; Paget disease of bone, familial; Pallister-Hall syndrome; Palmoplantar keratoderma, nonepidermolytic, focal or diffuse; Pancreatic agenesis and congenital heart disease; Papillon-Lef\xc3\xa8vre syndrome; Paragangliomas 3; Paramyotonia congenita of von Eulenburg; Parathyroid carcinoma; Parkinson disease 14, 15, 19 (juvenile-onset), 2, 20 (early-onset), 6, (autosomal recessive early-onset, and 9; Partial albinism; Partial hypoxanthine-guanine phosphoribosyltransferase deficiency; Patterned dystrophy of retinal pigment epithelium; PC-K6a; Pelizaeus-Merzbacher disease; Pendred syndrome; Peripheral demyelinating neuropathy, central dysmyelination; Hirschsprung disease; Permanent neonatal diabetes mellitus; Diabetes mellitus, permanent neonatal, with neurologic features; Neonatal insulin-dependent diabetes mellitus; Maturity-onset diabetes of the young, type 2; Peroxisome biogenesis disorder 14B, 2A, 4A, 5B, 6A, 7A, and 7B; Perrault syndrome 4; Perry syndrome; Persistent hyperinsulinemic hypoglycemia of infancy; familial hyperinsulinism; Phenotypes; Phenylketonuria; Pheochromocytoma; Hereditary Paraganglioma-Pheochromocytoma Syndromes; Paragangliomas 1; Carcinoid tumor of intestine; Cowden syndrome 3; Phosphoglycerate dehydrogenase deficiency; Phosphoglycerate kinase 1 deficiency; Photosensitive trichothiodystrophy; Phytanic acid storage disease; Pick disease; Pierson syndrome; Pigmentary retinal dystrophy; Pigmented nodular adrenocortical disease, primary, 1; Pilomatrixoma; Pitt-Hopkins syndrome; Pituitary dependent hypercortisolism; Pituitary hormone deficiency, combined 1, 2, 3, and 4; Plasminogen activator inhibitor type 1 deficiency; Plasminogen deficiency, type I; Platelet-type bleeding disorder 15 and 8; Poikiloderma, hereditary fibrosing, with tendon contractures, myopathy, and pulmonary fibrosis; Polycystic kidney disease 2, adult type, and infantile type; Polycystic lipomembranous osteodysplasia with sclerosing leukoencephalopathy; Polyglucosan body myopathy 1 with or without immunodeficiency; Polymicrogyria, asymmetric, bilateral frontoparietal; Polyneuropathy, hearing loss, ataxia, retinitis pigmentosa, and cataract; Pontocerebellar hypoplasia type 4; Popliteal pterygium syndrome; Porencephaly 2; Porokeratosis 8, disseminated superficial actinic type; Porphobilinogen synthase deficiency; porphyria cutanea tarda; Posterior column ataxia with retinitis pigmentosa; Posterior polar cataract type 2; Prader-Willi-like syndrome; Premature ovarian failure 4, 5, 7, and 9; Primary autosomal recessive microcephaly 10, 2, 3, and 5; Primary ciliary dyskinesia 24; Primary dilated cardiomyopathy; Left ventricular noncompaction 6; 4, Left ventricular noncompaction 10; Paroxysmal atrial fibrillation; Primary hyperoxaluria, type I, type, and type III; Primary hypertrophic osteoarthropathy, autosomal recessive 2; Primary hypomagnesemia; Primary open angle glaucoma juvenile onset 1; Primary pulmonary hypertension; Primrose syndrome; Progressive familial heart block type 1B; Progressive familial intrahepatic cholestasis 2 and 3; Progressive intrahepatic cholestasis; Progressive myoclonus epilepsy with ataxia; Progressive pseudorheumatoid dysplasia; Progressive sclerosing poliodystrophy; Prolidase deficiency; Proline dehydrogenase deficiency; Schizophrenia 4; Properdin deficiency, X-linked; Propionic academia; Proprotein convertase 1/3 deficiency; Prostate cancer, hereditary, 2; Protan defect; Proteinuria; Finnish congenital nephrotic syndrome; Proteus syndrome; Breast adenocarcinoma; Pseudoachondroplastic spondyloepiphyseal dysplasia syndrome; Pseudohypoaldosteronism type 1 autosomal dominant and recessive and type 2; Pseudohypoparathyroidism type 1A, Pseudopseudohypoparathyroidism; Pseudoneonatal adrenoleukodystrophy; Pseudoprimary hyperaldosteronism; Pseudoxanthoma elasticum; Generalized arterial calcification of infancy 2; Pseudoxanthoma elasticum-like disorder with multiple coagulation factor deficiency; Psoriasis susceptibility 2; PTEN hamartoma tumor syndrome; Pulmonary arterial hypertension related to hereditary hemorrhagic telangiectasia; Pulmonary Fibrosis And/Or Bone Marrow Failure, Telomere-Related, 1 and 3; Pulmonary hypertension, primary, 1, with hereditary hemorrhagic telangiectasia; Purine-nucleoside phosphorylase deficiency; Pyruvate carboxylase deficiency; Pyruvate dehydrogenase E1-alpha deficiency; Pyruvate kinase deficiency of red cells; Raine syndrome; Rasopathy; Recessive dystrophic epidermolysis bullosa; Nail disorder, nonsyndromic congenital, 8; Reifenstein syndrome; Renal adysplasia; Renal carnitine transport defect; Renal coloboma syndrome; Renal dysplasia; Renal dysplasia, retinal pigmentary dystrophy, cerebellar ataxia and skeletal dysplasia; Renal tubular acidosis, distal, autosomal recessive, with late-onset sensorineural hearing loss, or with hemolytic anemia; Renal tubular acidosis, proximal, with ocular abnormalities and mental retardation; Retinal cone dystrophy 3B; Retinitis pigmentosa; Retinitis pigmentosa 10, 11, 12, 14, 15, 17, and 19; Retinitis pigmentosa 2, 20, 25, 35, 36, 38, 39, 4, 40, 43, 45, 48, 66, 7, 70, 72; Retinoblastoma; Rett disorder; Rhabdoid tumor predisposition syndrome 2; Rhegmatogenous retinal detachment, autosomal dominant; Rhizomelic chondrodysplasia punctata type 2 and type 3; Roberts-SC phocomelia syndrome; Robinow Sorauf syndrome; Robinow syndrome, autosomal recessive, autosomal recessive, with brachy-syn-polydactyly; Rothmund-Thomson syndrome; Rapadilino syndrome; RRM2B-related mitochondrial disease; Rubinstein-Taybi syndrome; Salla disease; Sandhoff disease, adult and infantil types; Sarcoidosis, early-onset; Blau syndrome; Schindler disease, type 1; Schizencephaly; Schizophrenia 15; Schneckenbecken dysplasia; Schwannomatosis 2; Schwartz Jampel syndrome type 1; Sclerocornea, autosomal recessive; Sclerosteosis; Secondary hypothyroidism; Segawa syndrome, autosomal recessive; Senior-Loken syndrome 4 and 5, Sensory ataxic neuropathy, dysarthria, and ophthalmoparesis; Sepiapterin reductase deficiency; SeSAME syndrome; Severe combined immunodeficiency due to ADA deficiency, with microcephaly, growth retardation, and sensitivity to ionizing radiation, atypical, autosomal recessive, T cell-negative, B cell-positive, NK cell-negative of NK-positive; Partial adenosine deaminase deficiency; Severe congenital neutropenia; Severe congenital neutropenia 3, autosomal recessive or dominant; Severe congenital neutropenia and 6, autosomal recessive; Severe myoclonic epilepsy in infancy; Generalized epilepsy with febrile seizures plus, types 1 and 2; Severe X-linked myotubular myopathy; Short QT syndrome 3; Short stature with nonspecific skeletal abnormalities; Short stature, auditory canal atresia, mandibular hypoplasia, skeletal abnormalities; Short stature, onychodysplasia, facial dysmorphism, and hypotrichosis; Primordial dwarfism; Short-rib thoracic dysplasia 11 or 3 with or without polydactyly; Sialidosis type I and II; Silver spastic paraplegia syndrome; Slowed nerve conduction velocity, autosomal dominant; Smith-Lemli-Opitz syndrome; Snyder Robinson syndrome; Somatotroph adenoma; Prolactinoma; familial, Pituitary adenoma predisposition; Sotos syndrome 1 or 2; Spastic ataxia 5, autosomal recessive, Charlevoix-Saguenay type, 1, 10, or 11, autosomal recessive; Amyotrophic lateral sclerosis type 5; Spastic paraplegia 15, 2, 3, 35, 39, 4, autosomal dominant, 55, autosomal recessive, and 5A; Bile acid synthesis defect, congenital, 3; Spermatogenic failure 11, 3, and 8; Spherocytosis types 4 and 5; Spheroid body myopathy; Spinal muscular atrophy, lower extremity predominant 2, autosomal dominant; Spinal muscular atrophy, type II; Spinocerebellar ataxia 14, 21, 35, 40, and 6; Spinocerebellar ataxia autosomal recessive 1 and 16; Splenic hypoplasia; Spondylocarpotarsal synostosis syndrome; Spondylocheirodysplasia, Ehlers-Danlos syndrome-like, with immune dysregulation, Aggrecan type, with congenital joint dislocations, short limb-hand type, Sedaghatian type, with cone-rod dystrophy, and Kozlowski type; Parastremmatic dwarfism; Stargardt disease 1; Cone-rod dystrophy 3; Stickler syndrome type 1; Kniest dysplasia; Stickler syndrome, types 1(nonsyndromic ocular) and 4; Sting-associated vasculopathy, infantile-onset; Stormorken syndrome; Sturge-Weber syndrome, Capillary malformations, congenital, 1; Succinyl-CoA acetoacetate transferase deficiency; Sucrase-isomaltase deficiency; Sudden infant death syndrome; Sulfite oxidase deficiency, isolated; Supravalvar aortic stenosis; Surfactant metabolism dysfunction, pulmonary, 2 and 3; Symphalangism, proximal, lb; Syndactyly Cenani Lenz type; Syndactyly type 3; Syndromic X-linked mental retardation 16; Talipes equinovarus; Tangier disease; TARP syndrome; Tay-Sachs disease, B1 variant, Gm2-gangliosidosis (adult), Gm2-gangliosidosis (adult-onset); Temtamy syndrome; Tenorio Syndrome; Terminal osseous dysplasia; Testosterone 17-beta-dehydrogenase deficiency; Tetraamelia, autosomal recessive; Tetralogy of Fallot; Hypoplastic left heart syndrome 2; Truncus arteriosus; Malformation of the heart and great vessels; Ventricular septal defect 1; Thiel-Behnke corneal dystrophy; Thoracic aortic aneurysms and aortic dissections; Marfanoid habitus; Three M syndrome 2; Thrombocytopenia, platelet dysfunction, hemolysis, and imbalanced globin synthesis; Thrombocytopenia, X-linked; Thrombophilia, hereditary, due to protein C deficiency, autosomal dominant and recessive; Thyroid agenesis; Thyroid cancer, follicular; Thyroid hormone metabolism, abnormal; Thyroid hormone resistance, generalized, autosomal dominant; Thyrotoxic periodic paralysis and Thyrotoxic periodic paralysis 2; Thyrotropin-releasing hormone resistance, generalized; Timothy syndrome; TNF receptor-associated periodic fever syndrome (TRAPS); Tooth agenesis, selective, 3 and 4; Torsades de pointes; Townes-Brocks-branchiootorenal-like syndrome; Transient bullous dermolysis of the newborn; Treacher collins syndrome 1; Trichomegaly with mental retardation, dwarfism and pigmentary degeneration of retina; Trichorhinophalangeal dysplasia type I; Trichorhinophalangeal syndrome type 3; Trimethylaminuria; Tuberous sclerosis syndrome; Lymphangiomyomatosis; Tuberous sclerosis 1 and 2; Tyrosinase-negative oculocutaneous albinism; Tyrosinase-positive oculocutaneous albinism; Tyrosinemia type I; UDPglucose-4-epimerase deficiency; Ullrich congenital muscular dystrophy; Ulna and fibula absence of with severe limb deficiency; Upshaw-Schulman syndrome; Urocanate hydratase deficiency; Usher syndrome, types 1, 1B, 1D, 1G, 2A, 2C, and 2D; Retinitis pigmentosa 39; UV-sensitive syndrome; Van der Woude syndrome; Van Maldergem syndrome 2; Hennekam lymphangiectasia-lymphedema syndrome 2; Variegate porphyria; Ventriculomegaly with cystic kidney disease; Verheij syndrome; Very long chain acyl-CoA dehydrogenase deficiency; Vesicoureteral reflux 8; Visceral heterotaxy 5, autosomal; Visceral myopathy; Vitamin D-dependent rickets, types land 2; Vitelliform dystrophy; von Willebrand disease type 2M and type 3; Waardenburg syndrome type 1, 4C, and 2E (with neurologic involvement); Klein-Waardenberg syndrome; Walker-Warburg congenital muscular dystrophy; Warburg micro syndrome 2 and 4; Warts, hypogammaglobulinemia, infections, and myelokathexis; Weaver syndrome; Weill-Marchesani syndrome 1 and 3; Weill-Marchesani-like syndrome; Weissenbacher-Zweymuller syndrome; Werdnig-Hoffmann disease; Charcot-Marie-Tooth disease; Werner syndrome; WFS1-Related Disorders; Wiedemann-Steiner syndrome; Wilson disease; Wolfram-like syndrome, autosomal dominant; Worth disease; Van Buchem disease type 2; Xeroderma pigmentosum, complementation group b, group D, group E, and group G; X-linked agammaglobulinemia; X-linked hereditary motor and sensory neuropathy; X-linked ichthyosis with steryl-sulfatase deficiency; X-linked periventricular heterotopia; Oto-palato-digital syndrome, type I; X-linked severe combined immunodeficiency; Zimmermann-Laband syndrome and Zimmermann-Laband syndrome 2; and Zonular pulverulent cataract 3.

[0703] In some aspects, the present disclosure provides uses of any one of the base editors described herein and a guide RNA targeting this base editor to a target A:T base pair in a nucleic acid molecule in the manufacture of a kit for nucleic acid editing, wherein the nucleic acid editing comprises contacting the nucleic acid molecule with the base editor and guide RNA under conditions suitable for the substitution of the adenine (A) of the A:T nucleobase pair with an guanine (G). In some embodiments of these uses, the nucleic acid molecule is a double-stranded DNA molecule. In some embodiments, the step of contacting of induces separation of the double-stranded DNA at a target region. In some embodiments, the step of contacting further comprises nicking one strand of the double-stranded DNA, wherein the one strand comprises an unmutated strand that comprises the T of the target A:T nucleobase pair.

[0704] In some aspects, the present disclosure provides uses of any one of the base editors described herein and a guide RNA targeting this base editor to a target A:T base pair in a nucleic acid molecule in the manufacture of a kit for evaluating the off-target effects of a base editor, wherein the step of evaluating the off-target effects comprises contacting the base editor with the nucleic acid molecule and determining off-target effects in accordance with any one of the disclosed methods. In some embodiments of these uses, the nucleic acid molecule is a double-stranded DNA molecule. In some embodiments, the step of contacting of induces separation of the double-stranded DNA at a target region. In some embodiments, the step of contacting further comprises nicking one strand of the double-stranded DNA, wherein the one strand comprises an unmutated strand that comprises the T of the target A:T nucleobase pair.

[0705] In some embodiments of the described uses, the step of contacting is performed in vitro. In other embodiments, the step of contacting is performed in vivo. In some embodiments, the step of contacting is performed in a subject (e.g., a human subject or a non-human animal subject). In some embodiments, the step of contacting is performed in a cell, such as a human or non-human animal cell.

[0706] The present disclosure also provides uses of any one of the base editors described herein as a medicament. The present disclosure also provides uses of any one of the complexes of base editors and guide RNAs described herein as a medicament. Some aspects of this disclosure provide methods of using the fusion proteins, or complexes comprising a guide nucleic acid (e.g., gRNA) and a nucleobase editor provided herein to edit DNA, e.g., to edit SMN2. For example, some aspects of this disclosure provide methods comprising contacting a DNA, or RNA molecule with any of the fusion proteins provided herein, and with at least one guide nucleic acid (e.g., guide RNA), wherein the guide nucleic acid, (e.g., guide RNA) is comprises a sequence (e.g., a guide sequence that binds to a DNA target sequence) of at least 10 (e.g., at least 10, 15, 20, 25, or 30) contiguous nucleotides that is 100% complementary to a target sequence (e.g., any of the target SMN2 sequences provided herein). In some embodiments, the 3′ end of the target sequence is immediately adjacent to a canonical PAM sequence (NGG). In some embodiments, the 3′ end of the target sequence is not immediately adjacent to a canonical PAM sequence (NGG). In some embodiments, the 3′ end of the target sequence is immediately adjacent to an AGC, GAG, TTT, GTG, or CAA sequence.

[0707] Some aspects of the disclosure provide methods of using base editors (e.g., any of the fusion proteins provided herein) and gRNAs to correct a point mutation in an SMN2 gene. In some embodiments, the disclosure provides methods of using base editors (e.g., any of the fusion proteins provided herein) and gRNAs to generate an A to G and/or T to C mutation in an SMN2 gene. In some embodiments, the disclosure provides method for deaminating an adenosine nucleobase (A) in an SMN2 gene, the method comprising contacting the SMN2 gene with a base editor and a guide RNA bound to the base editor, where the guide RNA comprises a guide sequence that is complementary to a target nucleic acid sequence in the SMN2 gene. In some embodiments, the SMN2 gene comprises a C to T mutation. In some embodiments, the C to T mutation in the SMN2 gene masks an acceptor splice site, resulting in a truncated SMN protein encoded by the SMN2 gene (i.e., exon 7 is not transcribed). While the resulting protein functions as a full-length SMN protein, it is prone to rapid degradation due to the presence of an EMLA tail from exon 8 and the exposed exon 6 C-terminal amino acid chain. In some embodiments, the C to T mutation in the SMN2 gene results in the degradation of at least 1%, 2%, 5%, 10%, 15%, 20%, 25%, 30%, 35%, 40%, 45%, 50%, 55%, 60%, 65%, 70%, 75%, 80%, 85%, 90%, 95%, 98%, or at least 99% of the resulting SMN protein.

[0708] In some embodiments, deaminating an adenosine (A) nucleobase complementary to the T corrects the C to T mutation in the SMN2 gene. In some embodiments, the C to T or G to A mutation in the SMN2 gene leads to a Cys (C) to Tyr (Y) mutation in the SMN2 protein encoded by the SMN2 gene. In some embodiments, deaminating the adenosine nucleobase complementary to the T corrects the Cys to Tyr mutation in the SMN2 protein.

[0709] In some embodiments, the guide sequence of the gRNA comprises at least 8, 9, 10, 11, 12, 13, 14, 15, 16, 17, 18, 19, 20, 21, 22, 23, 24, 25, 26, 27, 28, 29, 30, 31, 32, 33, 34, or 35 contiguous nucleic acids that are 100% complementary to a target nucleic acid sequence of the SMN2 gene. In some embodiments, the base editor nicks the target sequence that is complementary to the guide sequence.

[0710] In some embodiments, the target DNA sequence comprises a sequence associated with a disease or disorder, e.g., SMA. In some embodiments, the target DNA sequence comprises a point mutation associated with a disease or disorder (e.g., exon 7 of SMN2). In some embodiments, the activity of the fusion protein (e.g., comprising an adenosine deaminase and a Cas9 domain), or the complex, results in a correction of the point mutation. In some embodiments, the target DNA sequence comprises a C→T point mutation associated with a disease or disorder, and wherein the deamination of the mutant base results in a sequence that is not associated with a disease or disorder. In some embodiments, the target DNA sequence encodes a protein, and the point mutation is in a codon and results in a change in the splice site of an exon, resulting in production of a full-length, fully functional protein (e.g., SMN protein). In some embodiments, the deamination of the mutant base results in the wild-type amino acid.

[0711] In some embodiments, the target DNA sequence comprises a sequence associated with a stop codon in an exon 8 of a SMN2 gene. In some embodiments, the activity of the fusion protein (e.g., comprising an adenosine deaminase and a Cas9 domain), or the complex, results in destruction of the stop codon and/or a frameshift mutation. Without wishing to be bound by theory, it is thought that destroying a stop codon (e.g., the 5^{th} codon stop sequence) and/or inducing at least one frameshift mutation result in a more stable SMN protein product, regardless of whether amino acids encoded by exon 7 are included in the protein. For example, in one embodiment, activity of the fusion protein (e.g., comprising an adenosine deaminase and a Cas9 domain), or the complex, results in adenine deamination of the 5^{th} codon stop sequence of a SMN2's exon 8, facilitating the addition of five amino acids at the C-terminal end of the translated SMN protein.

[0712] In some embodiments, the target DNA sequence comprises a sequence associated with an amino acid present in exon 6 of an SMN2 gene. Modification of one amino acid (e.g., 5270) using the methods described herein, can be used to slow the rate of SMN protein degradation.

[0713] In some embodiments, the contacting is in vivo in a subject. In some embodiments, the subject has or has been diagnosed with a disease or disorder (e.g., SMA).

[0714] Some embodiments provide methods for using the DNA editing fusion proteins provided herein. In some embodiments, the fusion protein is used to introduce a point mutation into a nucleic acid by deaminating a target nucleobase. In some embodiments, the deamination of the target nucleobase results in the correction of a genetic defect, e.g., in the correction of a point mutation that leads to degradation of the resulting SMN protein. In some embodiments, the genetic defect is associated with a disease or disorder, e.g., SMA.

[0715] In some embodiments, the purposes of the methods provided herein are to restore the full-length gene or to stabilize the resulting protein product via genome editing. The nucleobase editing proteins provided herein can be validated for gene editing-based human therapeutics in vitro, e.g., by correcting a disease-associated mutation in human cell culture. It will be understood by the skilled artisan that the nucleobase editing proteins provided herein, e.g., the fusion proteins comprising a nucleic acid programmable DNA binding protein (e.g., Cas9) and an adenosine deaminase domain can be used to correct any single point G to A or C to T mutation. In the first case, deamination of the mutant A to I corrects the mutation, and in the latter case, deamination of the A that is base-paired with the mutant T, followed by a round of replication or followed by base editing repair activity, corrects the mutation.

[0716] The instant disclosure provides methods for the treatment of a subject diagnosed with a disease associated with or caused by a point mutation that can be corrected by a DNA editing fusion protein provided herein. For example, in some embodiments, a method is provided that comprises administering to a subject having such a disease, e.g., SMA.

[0717] In some embodiments, a fusion protein recognizes canonical PAMs and therefore can correct the pathogenic G to A or C to T mutations with canonical PAMs, e.g., NGG, respectively, in the flanking sequences. For example, Cas9 proteins that recognize canonical PAMs comprise an amino acid sequence that is at least 80%, 85%, 90%, 95%, 97%, 98%, or 99% identical to the amino acid sequence of Streptococcus pyogenes Cas9 as provided by any one of SEQ ID NOs: 5, 8, 10, 12, and 407 or to a fragment thereof comprising the RuvC and HNH domains of any one of SEQ ID NOs: 5, 8, 10, 12, and 407.

[0718] It will be apparent to those of skill in the art that in order to target any of the fusion proteins comprising a Cas9 domain and an adenosine deaminase, as disclosed herein, to a target site, e.g., a site comprising a point mutation to be edited, it is typically necessary to co-express the fusion protein together with a guide RNA, e.g., an sgRNA. As explained in more detail elsewhere herein, a guide RNA typically comprises a tracrRNA framework allowing for Cas9 binding, and a guide sequence, which confers sequence specificity to the Cas9:nucleic acid editing enzyme/domain fusion protein. In some embodiments, the guide RNA sequence 5′-ATTTTGTCTAAAACCCTGTA-3′ (SEQ ID NO: 331), where the nucleotide target is indicated in bold. It should be appreciated that the Ts indicated in the gRNA sequence are uracil (Us) in the RNA sequence. Accordingly, in some embodiments, the gRNA comprises the sequence 5′-AUUUUGUCUAAAACCCUGUA-3′ (SEQ ID NO: 332).

[0719] In some embodiments, the guide sequence of the gRNA comprises a nucleic acid sequence selected from the group consisting of 5′-TTTGTCTAAAACCCTGTAAG-3′ (SEQ ID NO: 333), 5′-TTTTGTCTAAAACCCTGTAA-3′ (SEQ ID NO: 334), 5′-TGATTTTGTCTAAAACCC-3′ (SEQ ID NO: 335), 5′-GATTTTGTCTAAAACCCT-3′ (SEQ ID NO: 336), 5′-ATTTTGTCTAAAACCCTG-3′ (SEQ ID NO: 337), 5′-GTCTAAAACCCTGTAAGG-3′ (SEQ ID NO: 338), and 5′-TCTAAAACCCTGTAAGGA-3′ (SEQ ID NO: 339). As noted previously, the gRNA sequence may comprise uracil (U) instead of thymine (T). Therefore, in some embodiments, the guide sequence of the gRNA comprises a nucleic acid sequence selected from the group consisting of 5′-UUUGUCUAAAACCCUGUAAG-3′ (SEQ ID NO: 340), 5′-UUUUGUCUAAAACCCUGUAA-3′ (SEQ ID NO: 341), 5′-UGAUUUUGUCUAAAACCC-3′ (SEQ ID NO: 342), 5′-GAUUUUGUCUAAAACCCU-3′ (SEQ ID NO: 343), 5′-AUUUUGUCUAAAACCCUG-3′ (SEQ ID NO: 344), 5′-GUCUAAAACCCUGUAAGG-3′ (SEQ ID NO: 345), and 5′-UCUAAAACCCUGUAAGGA-3′ (SEQ ID NO: 346).

[0720] In some embodiments, the gRNA comprises a nucleic acid sequence selected from the group consisting of: 5′-TTTGCAGGAAATGCTGGCAT-3′ (SEQ ID NO: 347), 5′-TTCTCATTTGCAGGAAATGC-3′ (SEQ ID NO: 348), 5′-CATTTAGTGCTGCTCTATGC-3′ (SEQ ID NO: 349), 5′-CAGGAAATGCTGGCATAGAG-3′ (SEQ ID NO: 350), 5′-TTGCAGGAAATGCTGGCATA-3′ (SEQ ID NO: 351), 5′-ATTTGCAGGAAATGCTGGCA-3′ (SEQ ID NO: 352), and 5′-TGGCATAGAGCAGCACTAAA-3′ (SEQ ID NO: 353), where the nucleotide target is indicated in bold. It should be appreciated that the Ts indicated in the gRNA sequence are uracil (Us) in the RNA sequence. Accordingly, in some embodiments, the gRNA comprises a sequence selected from the group consisting of: 5′-UUUGCAGGAAAUGCUGGCAU-3′ (SEQ ID NO: 354), 5′-UUCUCAUUUGCAGGAAAUGC-3′ (SEQ ID NO: 355), 5′-CAUUUAGUGCUGCUCUAUGC-3′ (SEQ ID NO: 356), 5′-CAGGAAAUGCUGGCAUAGAG-3′ (SEQ ID NO: 357), 5′-UUGCAGGAAAUGCUGGCAUA-3′ (SEQ ID NO: 358), 5′-AUUUGCAGGAAAUGCUGGCA-3′ (SEQ ID NO: 359), and 5′-UGGCAUAGAGCAGCACUAAA-3′ (SEQ ID NO: 360).

[0721] In some embodiments, the gRNA comprises the nucleic acid sequence 5′-TGGCATAGAGCAGCACTAAA-3′ (SEQ ID NO: 361), where the nucleotide target is indicated in bold. It should be appreciated that the Ts indicated in the gRNA sequence are uracil (Us) in the RNA sequence. Accordingly, in some embodiments, the gRNA comprises the sequence: 5′-UGGCAUAGAGCAGCACUAAA-3′ (SEQ ID NO: 362).

[0722] Some aspects of the disclosure provide methods for editing a nucleic acid. In some embodiments, the method is a method for editing a nucleobase of a nucleic acid (e.g., a base pair of a double-stranded DNA sequence). In some embodiments, the method comprises the steps of: a) contacting a target region of a nucleic acid (e.g., a double-stranded DNA sequence) with a complex comprising a base editor (e.g., a Cas9 domain fused to an adenosine deaminase) and a guide nucleic acid (e.g., gRNA), wherein the target region comprises a targeted nucleobase pair, b) inducing strand separation of said target region, c) converting a first nucleobase of said target nucleobase pair in a single strand of the target region to a second nucleobase, and d) cutting no more than one strand of said target region, where a third nucleobase complementary to the first nucleobase base is replaced by a fourth nucleobase complementary to the second nucleobase. In some embodiments, the method results in less than 20% indel formation in the nucleic acid. It should be appreciated that in some embodiments, step b is omitted. In some embodiments, the first nucleobase is an adenine. In some embodiments, the second nucleobase is a deaminated adenine, or inosine. In some embodiments, the third nucleobase is a thymine. In some embodiments, the fourth nucleobase is a cytosine. In some embodiments, the method results in less than 19%, 18%, 16%, 14%, 12%, 10%, 8%, 6%, 4%, 2%, 1%, 0.5%, 0.2%, or less than 0.1% indel formation. In some embodiments, the method further comprises replacing the second nucleobase with a fifth nucleobase that is complementary to the fourth nucleobase, thereby generating an intended edited base pair (e.g., A:T to G:C). In some embodiments, the fifth nucleobase is a guanine. In some embodiments, at least 5% of the intended base pairs are edited. In some embodiments, at least 10%, 15%, 20%, 25%, 30%, 35%, 40%, 45%, or 50% of the intended base pairs are edited.

[0723] In some embodiments, the ratio of intended products to unintended products in the target nucleotide is at least 2:1, 5:1, 10:1, 20:1, 30:1, 40:1, 50:1, 60:1, 70:1, 80:1, 90:1, 100:1, or 200:1, or more. In some embodiments, the ratio of intended point mutation to indel formation is greater than 1:1, 10:1, 50:1, 100:1, 500:1, or 1000:1, or more. In some embodiments, the cut single strand (nicked strand) is hybridized to the guide nucleic acid. In some embodiments, the cut single strand is opposite to the strand comprising the first nucleobase. In some embodiments, the base editor comprises a Cas9 domain. In some embodiments, the first base is adenine, and the second base is not a G, C, A, or T. In some embodiments, the second base is inosine. In some embodiments, the first base is adenine. In some embodiments, the second base is not a G, C, A, or T. In some embodiments, the second base is inosine. In some embodiments, the base editor inhibits base excision repair of the edited strand. In some embodiments, the base editor protects or binds the non-edited strand. In some embodiments, the base editor comprises UGI activity. In some embodiments, the base editor comprises a catalytically inactive inosine-specific nuclease. In some embodiments, the base editor comprises nickase activity. In some embodiments, the intended edited base pair is upstream of a PAM site. In some embodiments, the intended edited base pair is 1, 2, 3, 4, 5, 6, 7, 8, 9, 10, 11, 12, 13, 14, 15, 16, 17, 18, 19, or 20 nucleotides upstream of the PAM site. In some embodiments, the intended edited base pair is downstream of a PAM site. In some embodiments, the intended edited base pair is 1, 2, 3, 4, 5, 6, 7, 8, 9, 10, 11, 12, 13, 14, 15, 16, 17, 18, 19, or 20 nucleotides downstream stream of the PAM site. In some embodiments, the method does not require a canonical (e.g., NGG) PAM site. In some embodiments, the nucleobase editor comprises a linker. In some embodiments, the linker is 1-25 amino acids in length. In some embodiments, the linker is 5-20 amino acids in length. In some embodiments, linker is 10, 11, 12, 13, 14, 15, 16, 17, 18, 19, or 20 amino acids in length. In some embodiments, the target region comprises a target window, wherein the target window comprises the target nucleobase pair. In some embodiments, the target window comprises 1-10 nucleotides. In some embodiments, the target window is 1-9, 1-8, 1-7, 1-6, 1-5, 1-4, 1-3, 1-2, or 1 nucleotides in length. In some embodiments, the target window is 1, 2, 3, 4, 5, 6, 7, 8, 9, 10, 11, 12, 13, 14, 15, 16, 17, 18, 19, or 20 nucleotides in length. In some embodiments, the intended edited base pair is within the target window. In some embodiments, the target window comprises the intended edited base pair. In some embodiments, the method is performed using any of the base editors provided herein. In some embodiments, a target window is a deamination window.

[0724] In some embodiments, the disclosure provides methods for editing a nucleotide. In some embodiments, the disclosure provides a method for editing a nucleobase pair of a double-stranded DNA sequence. In some embodiments, the method comprises a) contacting a target region of the double-stranded DNA sequence with a complex comprising a base editor and a guide nucleic acid (e.g., gRNA), where the target region comprises a target nucleobase pair, b) inducing strand separation of said target region, c) converting a first nucleobase of said target nucleobase pair in a single strand of the target region to a second nucleobase, d) cutting no more than one strand of said target region, wherein a third nucleobase complementary to the first nucleobase base is replaced by a fourth nucleobase complementary to the second nucleobase, and the second nucleobase is replaced with a fifth nucleobase that is complementary to the fourth nucleobase, thereby generating an intended edited base pair, wherein the efficiency of generating the intended edited base pair is at least 5%. It should be appreciated that in some embodiments, step b is omitted. In some embodiments, at least 5% of the intended base pairs are edited. In some embodiments, at least 10%, 15%, 20%, 25%, 30%, 35%, 40%, 45%, or 50% of the intended base pairs are edited. In some embodiments, the method causes less than 19%, 18%, 16%, 14%, 12%, 10%, 8%, 6%, 4%, 2%, 1%, 0.5%, 0.2%, or less than 0.1% indel formation. In some embodiments, the ratio of intended product to unintended products at the target nucleotide is at least 2:1, 5:1, 10:1, 20:1, 30:1, 40:1, 50:1, 60:1, 70:1, 80:1, 90:1, 100:1, or 200:1, or more. In some embodiments, the ratio of intended point mutation to indel formation is greater than 1:1, 10:1, 50:1, 100:1, 500:1, or 1000:1, or more. In some embodiments, the cut single strand is hybridized to the guide nucleic acid. In some embodiments, the cut single strand is opposite to the strand comprising the first nucleobase. In some embodiments, the first base is adenine. In some embodiments, the second nucleobase is not G, C, A, or T. In some embodiments, the second base is inosine. In some embodiments, the base editor inhibits base excision repair of the edited strand. In some embodiments, the base editor protects (e.g., form base excision repair) or binds the non-edited strand. In some embodiments, the nucleobase editor comprises UGI activity. In some embodiments, the base editor comprises a catalytically inactive inosine-specific nuclease. In some embodiments, the nucleobase editor comprises nickase activity. In some embodiments, the intended edited base pair is upstream of a PAM site. In some embodiments, the intended edited base pair is 1, 2, 3, 4, 5, 6, 7, 8, 9, 10, 11, 12, 13, 14, 15, 16, 17, 18, 19, or 20 nucleotides upstream of the PAM site. In some embodiments, the intended edited base pair is downstream of a PAM site. In some embodiments, the intended edited base pair is 1, 2, 3, 4, 5, 6, 7, 8, 9, 10, 11, 12, 13, 14, 15, 16, 17, 18, 19, or 20 nucleotides downstream stream of the PAM site. In some embodiments, the method does not require a canonical (e.g., NGG) PAM site. In some embodiments, the nucleobase editor comprises a linker. In some embodiments, the linker is 1-25 amino acids in length. In some embodiments, the linker is 5-20 amino acids in length. In some embodiments, the linker is 10, 11, 12, 13, 14, 15, 16, 17, 18, 19, or 20 amino acids in length. In some embodiments, the target region comprises a target window, wherein the target window comprises the target nucleobase pair. In some embodiments, the target window comprises 1-10 nucleotides. In some embodiments, the target window is 1-9, 1-8, 1-7, 1-6, 1-5, 1-4, 1-3, 1-2, or 1 nucleotides in length. In some embodiments, the target window is 1, 2, 3, 4, 5, 6, 7, 8, 9, 10, 11, 12, 13, 14, 15, 16, 17, 18, 19, or 20 nucleotides in length. In some embodiments, the intended edited base pair occurs within the target window. In some embodiments, the target window comprises the intended edited base pair. In some embodiments, the nucleobase editor is any one of the base editors provided herein.

[0725] The instant disclosure provides methods for the treatment of a subject diagnosed with a disease associated with or caused by a point mutation that can be corrected by the editing system provided herein, e.g., spinal muscular atrophy (SMA). For example, in some embodiments, a method is provided that comprises administering to a subject having such a disease, e.g., SMA, a an effective amount of the adenosine base editor and guide RNA described herein that corrects the exon 7 point mutation of SMN2 (e.g., the C840T mutation) or modifies a flanking exon (e.g., exon 6 or exon 8) so that the resulting SMN protein product more stable (e.g., is less prone to degradation).

[0726] X. Base Editor Delivery

[0727] In another aspect, the present disclosure provides for the delivery of base editors in vitro and in vivo using various strategies, including on separate vectors using split inteins and as well as direct delivery strategies of the ribonucleoprotein complex (i.e., the base editor complexed to the gRNA and/or the second-site gRNA) using techniques such as electroporation, use of cationic lipid-mediated formulations, and induced endocytosis methods using receptor ligands fused to to the ribonucleoprotein complexes. Any such methods are contemplated herein.

[0728] In some aspects, the invention provides methods comprising delivering one or more base editor-encoding polynucleotides, such as or one or more vectors as described herein encoding one or more components of the base editing system described herein, one or more transcripts thereof, and/or one or proteins transcribed therefrom, to a host cell. In some aspects, the invention further provides cells produced by such methods, and organisms (such as animals, plants, or fungi) comprising or produced from such cells. In some embodiments, a base editor as described herein in combination with (and optionally complexed with) a guide sequence is delivered to a cell. Conventional viral and non-viral based gene transfer methods can be used to introduce nucleic acids in mammalian cells or target tissues. Such methods can be used to administer nucleic acids encoding components of a base editor to cells in culture, or in a host organism. Non-viral vector delivery systems include DNA plasmids, RNA (e.g. a transcript of a vector described herein), naked nucleic acid, and nucleic acid complexed with a delivery vehicle, such as a liposome. Viral vector delivery systems include DNA and RNA viruses, which have either episomal or integrated genomes after delivery to the cell. For a review of gene therapy procedures, see Anderson, Science 256:808-813 (1992); Nabel & Felgner, TIBTECH 11:211-217 (1993); Mitani & Caskey, TIBTECH 11:162-166 (1993); Dillon, TIBTECH 11:167-175 (1993); Miller, Nature 357:455-460 (1992); Van Brunt, Biotechnology 6(10):1149-1154 (1988); Vigne, Restorative Neurology and Neuroscience 8:35-36 (1995); Kremer & Perricaudet, British Medical Bulletin 51(1):31-44 (1995); Haddada et al., in Current Topics in Microbiology and Immunology Doerfler and Bihm (eds) (1995); and Yu et al., Gene Therapy 1:13-26 (1994).

[0729] Methods of non-viral delivery of nucleic acids include lipofection, nucleofection, microinjection, biolistics, virosomes, liposomes, immunoliposomes, polycation or lipid:nucleic acid conjugates, naked DNA, artificial virions, and agent-enhanced uptake of DNA. Lipofection is described in e.g., U.S. Pat. Nos. 5,049,386, 4,946,787; and 4,897,355) and lipofection reagents are sold commercially (e.g., Transfectam™ and Lipofectin™) Cationic and neutral lipids that are suitable for efficient receptor-recognition lipofection of polynucleotides include those of Feigner, WO 91/17424; WO 91/16024. Delivery can be to cells (e.g. in vitro or ex vivo administration) or target tissues (e.g. in vivo administration).

[0730] The preparation of lipid:nucleic acid complexes, including targeted liposomes such as immunolipid complexes, is well known to one of skill in the art (see, e.g., Crystal, Science 270:404-410 (1995); Blaese et al., Cancer Gene Ther. 2:291-297 (1995); Behr et al., Bioconjugate Chem. 5:382-389 (1994); Remy et al., Bioconjugate Chem. 5:647-654 (1994); Gao et al., Gene Therapy 2:710-722 (1995); Ahmad et al., Cancer Res. 52:4817-4820 (1992); U.S. Pat. Nos. 4,186,183, 4,217,344, 4,235,871, 4,261,975, 4,485,054, 4,501,728, 4,774,085, 4,837,028, and 4,946,787).

[0731] The use of RNA or DNA viral based systems for the delivery of nucleic acids take advantage of highly evolved processes for targeting a virus to specific cells in the body and trafficking the viral payload to the nucleus. Viral vectors can be administered directly to patients (in vivo) or they can be used to treat cells in vitro, and the modified cells may optionally be administered to patients (ex vivo). Conventional viral based systems could include retroviral, lentivirus, adenoviral, adeno-associated and herpes simplex virus vectors for gene transfer. Integration in the host genome is possible with the retrovirus, lentivirus, and adeno-associated virus gene transfer methods, often resulting in long term expression of the inserted transgene. Additionally, high transduction efficiencies have been observed in many different cell types and target tissues.

[0732] The tropism of a viruses can be altered by incorporating foreign envelope proteins, expanding the potential target population of target cells. Lentiviral vectors are retroviral vectors that are able to transduce or infect non-dividing cells and typically produce high viral titers. Selection of a retroviral gene transfer system would therefore depend on the target tissue. Retroviral vectors are comprised of cis-acting long terminal repeats with packaging capacity for up to 6-10 kb of foreign sequence. The minimum cis-acting LTRs are sufficient for replication and packaging of the vectors, which are then used to integrate the therapeutic gene into the target cell to provide permanent transgene expression. Widely used retroviral vectors include those based upon murine leukemia virus (MuLV), gibbon ape leukemia virus (GaLV), Simian Immuno deficiency virus (SIV), human immuno deficiency virus (HIV), and combinations thereof (see, e.g., Buchscher et al., J. Virol. 66:2731-2739 (1992); Johann et al., J. Virol. 66:1635-1640 (1992); Sommnerfelt et al., Virol. 176:58-59 (1990); Wilson et al., J. Virol. 63:2374-2378 (1989); Miller et al., J. Virol. 65:2220-2224 (1991); PCT/US94/05700). In applications where transient expression is preferred, adenoviral based systems may be used. Adenoviral based vectors are capable of very high transduction efficiency in many cell types and do not require cell division. With such vectors, high titer and levels of expression have been obtained. This vector can be produced in large quantities in a relatively simple system. Adeno-associated virus (“AAV”) vectors may also be used to transduce cells with target nucleic acids, e.g., in the in vitro production of nucleic acids and peptides, and for in vivo and ex vivo gene therapy procedures (see, e.g., West et al., Virology 160:38-47 (1987); U.S. Pat. No. 4,797,368; WO 93/24641; Kotin, Human Gene Therapy 5:793-801 (1994); Muzyczka, J. Clin. Invest. 94:1351 (1994). Construction of recombinant AAV vectors are described in a number of publications, including U.S. Pat. No. 5,173,414; Tratschin et al., Mol. Cell. Biol. 5:3251-3260 (1985); Tratschin, et al., Mol. Cell. Biol. 4:2072-2081 (1984); Hermonat & Muzyczka, PNAS 81:6466-6470 (1984); and Samulski et al., J. Virol. 63:03822-3828 (1989).

[0733] Packaging cells are typically used to form virus particles that are capable of infecting a host cell. Such cells include 293 cells, which package adenovirus, and W2 cells or PA317 cells, which package retrovirus. Viral vectors used in gene therapy are usually generated by producing a cell line that packages a nucleic acid vector into a viral particle. The vectors typically contain the minimal viral sequences required for packaging and subsequent integration into a host, other viral sequences being replaced by an expression cassette for the polynucleotide(s) to be expressed. The missing viral functions are typically supplied in trans by the packaging cell line. For example, AAV vectors used in gene therapy typically only possess ITR sequences from the AAV genome which are required for packaging and integration into the host genome. Viral DNA is packaged in a cell line, which contains a helper plasmid encoding the other AAV genes, namely rep and cap, but lacking ITR sequences. The cell line may also be infected with adenovirus as a helper. The helper virus promotes replication of the AAV vector and expression of AAV genes from the helper plasmid. The helper plasmid is not packaged in significant amounts due to a lack of ITR sequences. Contamination with adenovirus can be reduced by, e.g., heat treatment to which adenovirus is more sensitive than AAV. Additional methods for the delivery of nucleic acids to cells are known to those skilled in the art. See, for example, US20030087817, incorporated herein by reference.

[0734] In various embodiments, the base editor constructs (including, the split-constructs) may be engineered for delivery in one or more rAAV vectors. An rAAV as related to any of the methods and compositions provided herein may be of any serotype including any derivative or pseudotype (e.g., 1, 2, 3, 4, 5, 6, 7, 8, 9, 10, 11, 12, 13, 2/1, 2/5, 2/8, 2/9, 3/1, 3/5, 3/8, or 3/9). An rAAV may comprise a genetic load (i.e., a recombinant nucleic acid vector that expresses a gene of interest, such as a whole or split base editor fusion protein that is carried by the rAAV into a cell) that is to be delivered to a cell. An rAAV may be chimeric.

[0735] As used herein, the serotype of an rAAV refers to the serotype of the capsid proteins of the recombinant virus. Non-limiting examples of derivatives and pseudotypes include rAAV2/1, rAAV2/5, rAAV2/8, rAAV2/9, AAV2-AAV3 hybrid, AAVrh.10, AAVhu.14, AAV3a/3b, AAVrh32.33, AAV-HSC15, AAV-HSC17, AAVhu.37, AAVrh.8, CHt-P6, AAV2.5, AAV6.2, AAV2i8, AAV-HSC15/17, AAVM41, AAV9.45, AAV6(Y445F/Y731F), AAV2.5T, AAV-HAE1/2, AAV clone 32/83, AAVShH10, AAV2 (Y->F), AAV8 (Y733F), AAV2.15, AAV2.4, AAVM41, and AAVr3.45. A non-limiting example of derivatives and pseudotypes that have chimeric VP1 proteins is rAAV2/5-1VP1u, which has the genome of AAV2, capsid backbone of AAV5 and VP1u of AAV1. Other non-limiting example of derivatives and pseudotypes that have chimeric VP1 proteins are rAAV2/5-8VP1u, rAAV2/9-1VP1u, and rAAV2/9-8VP1u.

[0736] AAV derivatives/pseudotypes, and methods of producing such derivatives/pseudotypes are known in the art (see, e.g., Mol Ther. 2012 April; 20(4):699-708. doi: 10.1038/mt.2011.287. Epub 2012 Jan. 24. The AAV vector toolkit: poised at the clinical crossroads. Asokan A1, Schaffer DV, Samulski RJ.). Methods for producing and using pseudotyped rAAV vectors are known in the art (see, e.g., Duan et al., J. Virol., 75:7662-7671, 2001; Halbert et al., J. Virol., 74:1524-1532, 2000; Zolotukhin et al., Methods, 28:158-167, 2002; and Auricchio et al., Hum. Molec. Genet., 10:3075-3081, 2001).

[0737] Methods of making or packaging rAAV particles are known in the art and reagents are commercially available (see, e.g., Zolotukhin et al. Production and purification of serotype 1, 2, and 5 recombinant adeno-associated viral vectors. Methods 28 (2002) 158-167; and U.S. Patent Publication Numbers US20070015238 and US20120322861, which are incorporated herein by reference; and plasmids and kits available from ATCC and Cell Biolabs, Inc.). For example, a plasmid comprising a gene of interest may be combined with one or more helper plasmids, e.g., that contain a rep gene (e.g., encoding Rep78, Rep68, Rep52 and Rep40) and a cap gene (encoding VP1, VP2, and VP3, including a modified VP2 region as described herein), and transfected into a recombinant cells such that the rAAV particle can be packaged and subsequently purified.

[0738] Recombinant AAV may comprise a nucleic acid vector, which may comprise at a minimum: (a) one or more heterologous nucleic acid regions comprising a sequence encoding a protein or polypeptide of interest or an RNA of interest (e.g., a siRNA or microRNA), and (b) one or more regions comprising inverted terminal repeat (ITR) sequences (e.g., wild-type ITR sequences or engineered ITR sequences) flanking the one or more nucleic acid regions (e.g., heterologous nucleic acid regions). Herein, heterologous nucleic acid regions comprising a sequence encoding a protein of interest or RNA of interest are referred to as genes of interest.

[0739] Any one of the rAAV particles provided herein may have capsid proteins that have amino acids of different serotypes outside of the VP1u region. In some embodiments, the serotype of the backbone of the VP1 protein is different from the serotype of the ITRs and/or the Rep gene. In some embodiments, the serotype of the backbone of the VP1 capsid protein of a particle is the same as the serotype of the ITRs. In some embodiments, the serotype of the backbone of the VP1 capsid protein of a particle is the same as the serotype of the Rep gene. In some embodiments, capsid proteins of rAAV particles comprise amino acid mutations that result in improved transduction efficiency.

[0740] In some embodiments, the nucleic acid vector comprises one or more regions comprising a sequence that facilitates expression of the nucleic acid (e.g., the heterologous nucleic acid), e.g., expression control sequences operatively linked to the nucleic acid. Numerous such sequences are known in the art. Non-limiting examples of expression control sequences include promoters, insulators, silencers, response elements, introns, enhancers, initiation sites, termination signals, and poly(A) tails. Any combination of such control sequences is contemplated herein (e.g., a promoter and an enhancer).

[0741] Final AAV constructs may incorporate a sequence encoding the gRNA. In other embodiments, the AAV constructs may incorporate a sequence encoding the second-site nicking guide RNA. In still other embodiments, the AAV constructs may incorporate a sequence encoding the second-site nicking guide RNA and a sequence encoding the gRNA.

[0742] In various embodiments, the gRNAs and the second-site nicking guide RNAs can be expressed from an appropriate promoter, such as a human U6 (hU6) promoter, a mouse U6 (mU6) promoter, or other appropriate promoter. The gRNAs and the second-site nicking guide RNAs can be driven by the same promoters or different promoters.

[0743] In some embodiments, a rAAV constructs or the herein compositions are administered to a subject enterally. In some embodiments, a rAAV constructs or the herein compositions are administered to the subject parenterally. In some embodiments, a rAAV particle or the herein compositions are administered to a subject subcutaneously, intraocularly, intravitreally, subretinally, intravenously (IV), intracerebro-ventricularly, intramuscularly, intrathecally (IT), intracisternally, intraperitoneally, via inhalation, topically, or by direct injection to one or more cells, tissues, or organs. In some embodiments, a rAAV particle or the herein compositions are administered to the subject by injection into the hepatic artery or portal vein.

[0744] In other aspects, the base editors can be divided at a split site and provided as two halves of a whole/complete base editor. The two halves can be delivered to cells (e.g., as expressed proteins or on separate expression vectors) and once in contact inside the cell, the two halves form the complete base editor through the self-splicing action of the inteins on each base editor half. Split intein sequences can be engineered into each of the halves of the encoded base editor to facilitate their transplicing inside the cell and the concomitant restoration of the complete, functioning base editor.

[0745] These split intein-based methods overcome several barriers to in vivo delivery. For example, the DNA encoding base editors is larger than the rAAV packaging limit, and so requires special solutions. One such solution is formulating the editor fused to split intein pairs that are packaged into two separate rAAV particles that, when co-delivered to a cell, reconstitute the functional editor protein. Several other special considerations to account for the unique features of base editing are described, including the optimization of second-site nicking targets and properly packaging base editors into virus vectors, including lentiviruses and rAAV.

[0746] In this aspect, the base editors can be divided at a split site and provided as two halves of a whole/complete base editor. The two halves can be delivered to cells (e.g., as expressed proteins or on separate expression vectors) and once in contact inside the cell, the two halves form the complete base editor through the self-splicing action of the inteins on each base editor half. Split intein sequences can be engineered into each of the halves of the encoded base editor to facilitate their transplicing inside the cell and the concomitant restoration of the complete, functioning base editor.

[0747] In various embodiments, the base editors may be engineered as two half proteins (i.e., a BE N-terminal half and a BE C-terminal half) by “splitting” the whole base editor as a “split site.” The “split site” refers to the location of insertion of split intein sequences (i.e., the N intein and the C intein) between two adjacent amino acid residues in the base editor. More specifically, the “split site” refers to the location of dividing the whole base editor into two separate halves, wherein in each halve is fused at the split site to either the N intein or the C intein motifs. The split site can be at any suitable location in the base editor fusion protein, but preferably the split site is located at a position that allows for the formation of two half proteins which are appropriately sized for delivery (e.g., by expression vector) and wherein the inteins, which are fused to each half protein at the split site termini, are available to sufficiently interact with one another when one half protein contacts the other half protein inside the cell.

[0748] In some embodiments, the split site is located in the napDNAbp domain. In other embodiments, the split site is located in the RT domain. In other embodiments, the split site is located in a linker that joins the napDNAbp domain and the RT domain.

[0749] In various embodiments, split site design requires finding sites to split and insert an N- and C-terminal intein that are both structurally permissive for purposes of packaging the two half base editor domains into two different AAV genomes. Additionally, intein residues necessary for trans splicing can be incorporated by mutating residues at the N terminus of the C terminal extein or inserting residues that will leave an intein “scar.”

[0750] In various embodiments, using SpCas9 nickase (SEQ ID NO: 29, 1368 amino acids) as an example, the split can between any two amino acids between 1 and 1368. Preferred splits, however, will be located between the central region of the protein, e.g., from amino acids 50-1250, or from 100-1200, or from 150-1150, or from 200-1100, or from 250-1050, or from 300-1000, or from 350-950, or from 400-900, or from 450-850, or from 500-800, or from 550-750, or from 600-700 of SEQ ID NO: 29. In specific exemplary embodiments, the split site may be between 740/741, or 801/802, or 1010/1011, or 1041/1042. In other embodiments the split site may be between 1/2, 2/3, 3/4, 4/5, 5/6, 6/7, 7/8, 8/9, 9/10, 10/11, 12/13, 14/15, 15/16, 17/18, 19/20 . . . 50/51 . . . 100/101 . . . 200/201 . . . 300/301 . . . 400/401 . . . 500/501 . . . 600/601 . . . 700/701 . . . 800/801 . . . 900/901 . . . 1000/1001 . . . 1100/1101 . . . 1200/1201 . . . 1300/1301 . . . and 1367/1368, including all adjacent pairs of amino acid residues.

[0751] In various embodiments, the split intein sequences can be engineered by from the following intein sequences.

2-4 INTEIN:
(SEQ ID NO: 164)
CLAEGTRIFDPVTGTTHRIEDVVDGRKPIHVVAAA
KDGTLLARPVVSWFDQGTRDVIGLRIAGGAIVWAT
PDHKVLTEYGWRAAGELRKGDRVAGPGGSGNSLAL
SLTADQMVSALLDAEPPILYSEYDPTSPFSEASMM
GLLTNLADRELVHMINWAKRVPGFVDLTLHDQAHL
LECAWLEILMIGLVWRSMEHPGKLLFAPNLLLDRN
QGKCVEGMVEIFDMLLATSSRFRMMNLQGEEFVCL
KSIILLNSGVYTFLSSTLKSLEEKDHIHRALDKIT
DTLIHLMAKAGLTLQQQHQRLAQLLLILSHIRHMS
NKGMEHLYSMKYKNVVPLYDLLLEMLDAHRLHAGG
SGASRVQAFADALDDKFLHDMLAEELRYSVIREVL
PTRRARTFDLEVEELHTLVAEGVVVHNC
3-2 INTEIN
(SEQ ID NO: 165)
CLAEGTRIFDPVTGTTHRIEDVVDGRKPIHVVAVA
KDGTLLARPVVSWFDQGTRDVIGLRIAGGAIVWAT
PDHKVLTEYGWRAAGELRKGDRVAGPGGSGNSLAL
SLTADQMVSALLDAEPPILYSEYDPTSPFSEASMM
GLLTNLADRELVHMINWAKRVPGFVDLTLHDQAHL
LECAWLEILMIGLVWRSMEHPGKLLFAPNLLLDRN
QGKCVEGMVEIFDMLLATSSRFRMMNLQGEEFVCL
KSIILLNSGVYTFLSSTLKSLEEKDHIHRALDKIT
DTLIHLMAKAGLTLQQQHQRLAQLLLILSHIRHMS
NKGMEHLYSMKYTNVVPLYDLLLEMLDAHRLHAGG
SGASRVQAFADALDDKFLHDMLAEELRYSVIREVL
PTRRARTFDLEVEELHTLVAEGVVVHNC
30R3-1 INTEIN
(SEQ ID NO: 166)
CLAEGTRIFDPVTGTTHRIEDVVDGRKPIHVVAAA
KDGTLLARPVVSWFDQGTRDVIGLRIAGGATVWAT
PDHKVLTEYGWRAAGELRKGDRVAGPGGSGNSLAL
SLTADQMVSALLDAEPPIPYSEYDPTSPFSEASMM
GLLTNLADRELVHMINWAKRVPGFVDLTLHDQAHL
LECAWLEILMIGLVWRSMEHPGKLLFAPNLLLDRN
QGKCVEGMVEIFDMLLATSSRFRMMNLQGEEFVCL
KSIILLNSGVYTFLSSTLKSLEEKDHIHRALDKIT
DTLIHLMAKAGLTLQQQHQRLAQLLLILSHIRHMS
NKGMEHLYSMKYKNVVPLYDLLLEMLDAHRLHAGG
SGASRVQAFADALDDKFLHDMLAEGLRYSVIREVL
PTRRARTFDLEVEELHTLVAEGVVVHNC
30R3-2 INTEIN
(SEQ ID NO: 167)
CLAEGTRIFDPVTGTTHRIEDVVDGRKPIHVVAAA
KDGTLLARPVVSWFDQGTRDVIGLRIAGGATVWAT
PDHKVLTEYGWRAAGELRKGDRVAGPGGSGNSLAL
SLTADQMVSALLDAEPPILYSEYDPTSPFSEASMM
GLLTNLADRELVHMINWAKRVPGFVDLTLHDQAHL
LECAWLEILMIGLVWRSMEHPGKLLFAPNLLLDRN
QGKCVEGMVEIFDMLLATSSRFRMMNLQGEEFVCL
KSIILLNSGVYTFLSSTLKSLEEKDHIHRALDKIT
DTLIHLMAKAGLTLQQQHQRLAQLLLILSHIRHMS
NKGMEHLYSMKYKNVVPLYDLLLEMLDAHRLHAGG
SGASRVQAFADALDDKFLHDMLAEELRYSVIREVL
PTRRARTFDLEVEELHTLVAEGVVVHNC
30R3-3 INTEIN
(SEQ ID NO: 168)
CLAEGTRIFDPVTGTTHRIEDVVDGRKPIHVVAAA
KDGTLLARPVVSWFDQGTRDVIGLRIAGGATVWAT
PDHKVLTEYGWRAAGELRKGDRVAGPGGSGNSLAL
SLTADQMVSALLDAEPPIPYSEYDPTSPFSEASMM
GLLTNLADRELVHMINWAKRVPGFVDLTLHDQAHL
LECAWLEILMIGLVWRSMEHPGKLLFAPNLLLDRN
QGKCVEGMVEIFDMLLATSSRFRMMNLQGEEFVCL
KSIILLNSGVYTFLSSTLKSLEEKDHIHRALDKIT
DTLIHLMAKAGLTLQQQHQRLAQLLLILSHIRHMS
NKGMEHLYSMKYKNVVPLYDLLLEMLDAHRLHAGG
SGASRVQAFADALDDKFLHDMLAEELRYSVIREVL
PTRRARTFDLEVEELHTLVAEGVVVHNC
37R3-1 INTEIN
((SEQ ID NO: 169)
CLAEGTRIFDPVTGTTHRIEDVVDGRKPIHVVAAA
KDGTLLARPVVSWFDQGTRDVIGLRIAGGATVWAT
PDHKVLTEYGWRAAGELRKGDRVAGPGGSGNSLAL
SLTADQMVSALLDAEPPILYSEYNPTSPFSEASMM
GLLTNLADRELVHMINWAKRVPGFVDLTLHDQAHL
LERAWLEILMIGLVWRSMEHPGKLLFAPNLLLDRN
QGKCVEGMVEIFDMLLATSSRFRMMNLQGEEFVCL
KSIILLNSGVYTFLSSTLKSLEEKDHIHRALDKIT
DTLIHLMAKAGLTLQQQHQRLAQLLLILSHIRHMS
NKGMEHLYSMKYKNVVPLYDLLLEMLDAHRLHAGG
SGASRVQAFADALDDKFLHDMLAEGLRYSVIREVL
PTRRARTFDLEVEELHTLVAEGVVVHNC
37R3-2 INTEIN
(SEQ ID NO: 170)
CLAEGTRIFDPVTGTTHRIEDVVDGRKPIHVVAAA
KDGTLLARPVVSWFDQGTRDVIGLRIAGGAIVWAT
PDHKVLTEYGWRAAGELRKGDRVAGPGGSGNSLAL
SLTADQMVSALLDAEPPILYSEYDPTSPFSEASMM
GLLTNLADRELVHMINWAKRVPGFVDLTLHDQAHL
LERAWLEILMIGLVWRSMEHPGKLLFAPNLLLDRN
QGKCVEGMVEIFDMLLATSSRFRMMNLQGEEFVCL
KSIILLNSGVYTFLSSTLKSLEEKDHIHRALDKIT
DTLIHLMAKAGLTLQQQHQRLAQLLLILSHIRHMS
NKGMEHLYSMKYKNVVPLYDLLLEMLDAHRLHAGG
SGASRVQAFADALDDKFLHDMLAEGLRYSVIREVL
PTRRARTFDLEVEELHTLVAEGVVVHNC
37R3-3 INTEIN
(SEQ ID NO: 171)
CLAEGTRIFDPVTGTTHRIEDVVDGRKPIHVVAVA
KDGTLLARPVVSWFDQGTRDVIGLRIAGGATVWAT
PDHKVLTEYGWRAAGELRKGDRVAGPGGSGNSLAL
SLTADQMVSALLDAEPPILYSEYDPTSPFSEASMM
GLLTNLADRELVHMINWAKRVPGFVDLTLHDQAHL
LERAWLEILMIGLVWRSMEHPGKLLFAPNLLLDRN
QGKCVEGMVEIFDMLLATSSRFRMMNLQGEEFVCL
KSIILLNSGVYTFLSSTLKSLEEKDHIHRALDKIT
DTLIHLMAKAGLTLQQQHQRLAQLLLILSHIRHMS
NKGMEHLYSMKYKNVVPLYDLLLEMLDAHRLHAGG
SGASRVQAFADALDDKFLHDMLAEELRYSVIREVL
PTRRARTFDLEVEELHTLVAEGVVVHNC

[0752] In various embodiments, the split inteins can be used to separately deliver separate portions of a complete Base editor fusion protein to a cell, which upon expression in a cell, become reconstituted as a complete Base editor fusion protein through the trans splicing.

[0753] In some embodiments, the disclosure provides a method of delivering a Base editor fusion protein to a cell, comprising: constructing a first expression vector encoding an N-terminal fragment of the Base editor fusion protein fused to a first split intein sequence; constructing a second expression vector encoding a C-terminal fragment of the Base editor fusion protein fused to a second split intein sequence; delivering the first and second expression vectors to a cell, wherein the N-terminal and C-terminal fragment are reconstituted as the Base editor fusion protein in the cell as a result of trans splicing activity causing self-excision of the first and second split intein sequences.

[0754] In other embodiments, the split site is in the napDNAbp domain.

[0755] In still other embodiments, the split site is in the adenosine deaminase domain.

[0756] In yet other embodiments, the split site is in the linker.

[0757] In other embodiments, the base editors may be delivered by ribonucleoprotein complexes.

[0758] In this aspect, the base editors may be delivered by non-viral delivery strategies involving delivery of a base editor complexed with a gRNA (i.e., a BE ribonucleoprotein complex) by various methods, including electroporation and lipid nanoparticles. Methods of non-viral delivery of nucleic acids include lipofection, nucleofection, microinjection, biolistics, virosomes, liposomes, immunoliposomes, polycation or lipid:nucleic acid conjugates, naked DNA, artificial virions, and agent-enhanced uptake of DNA. Lipofection is described in e.g., U.S. Pat. Nos. 5,049,386, 4,946,787; and 4,897,355) and lipofection reagents are sold commercially (e.g., Transfectam™ and Lipofectin™). Cationic and neutral lipids that are suitable for efficient receptor-recognition lipofection of polynucleotides include those of Feigner, WO 91/17424; WO 91/16024. Delivery can be to cells (e.g. in vitro or ex vivo administration) or target tissues (e.g. in vivo administration).

[0759] The preparation of lipid:nucleic acid complexes, including targeted liposomes such as immunolipid complexes, is well known to one of skill in the art (see, e.g., Crystal, Science 270:404-410 (1995); Blaese et al., Cancer Gene Ther. 2:291-297 (1995); Behr et al., Bioconjugate Chem. 5:382-389 (1994); Remy et al., Bioconjugate Chem. 5:647-654 (1994); Gao et al., Gene Therapy 2:710-722 (1995); Ahmad et al., Cancer Res. 52:4817-4820 (1992); U.S. Pat. Nos. 4,186,183, 4,217,344, 4,235,871, 4,261,975, 4,485,054, 4,501,728, 4,774,085, 4,837,028, and 4,946,787).

[0760] XI. Pharmaceutical Compositions

[0761] Other aspects of the present disclosure relate to pharmaceutical compositions comprising any of the adenosine deaminases, fusion proteins, or the fusion protein-gRNA complexes described herein. The term “pharmaceutical composition”, as used herein, refers to a composition formulated for pharmaceutical use. In some embodiments, the pharmaceutical composition further comprises a pharmaceutically acceptable carrier. In some embodiments, the pharmaceutical composition comprises additional agents (e.g. for specific delivery, increasing half-life, or other therapeutic compounds).

[0762] As used here, the term “pharmaceutically-acceptable carrier” means a pharmaceutically-acceptable material, composition or vehicle, such as a liquid or solid filler, diluent, excipient, manufacturing aid (e.g., lubricant, talc magnesium, calcium or zinc stearate, or steric acid), or solvent encapsulating material, involved in carrying or transporting the compound from one site (e.g., the delivery site) of the body, to another site (e.g., organ, tissue or portion of the body). A pharmaceutically acceptable carrier is “acceptable” in the sense of being compatible with the other ingredients of the formulation and not injurious to the tissue of the subject (e.g., physiologically compatible, sterile, physiologic pH, etc.). Some examples of materials which can serve as pharmaceutically-acceptable carriers include: (1) sugars, such as lactose, glucose and sucrose; (2) starches, such as corn starch and potato starch; (3) cellulose, and its derivatives, such as sodium carboxymethyl cellulose, methylcellulose, ethyl cellulose, microcrystalline cellulose and cellulose acetate; (4) powdered tragacanth; (5) malt; (6) gelatin; (7) lubricating agents, such as magnesium stearate, sodium lauryl sulfate and talc; (8) excipients, such as cocoa butter and suppository waxes; (9) oils, such as peanut oil, cottonseed oil, safflower oil, sesame oil, olive oil, corn oil and soybean oil; (10) glycols, such as propylene glycol; (11) polyols, such as glycerin, sorbitol, mannitol and polyethylene glycol (PEG); (12) esters, such as ethyl oleate and ethyl laurate; (13) agar; (14) buffering agents, such as magnesium hydroxide and aluminum hydroxide; (15) alginic acid; (16) pyrogen-free water; (17) isotonic saline; (18) Ringer's solution; (19) ethyl alcohol; (20) pH buffered solutions; (21) polyesters, polycarbonates and/or polyanhydrides; (22) bulking agents, such as polypeptides and amino acids (23) serum component, such as serum albumin, HDL and LDL; (22) C2-C12 alcohols, such as ethanol; and (23) other non-toxic compatible substances employed in pharmaceutical formulations. Wetting agents, coloring agents, release agents, coating agents, sweetening agents, flavoring agents, perfuming agents, preservative and antioxidants can also be present in the formulation. The terms such as “excipient”, “carrier”, “pharmaceutically acceptable carrier” or the like are used interchangeably herein.

[0763] In some embodiments, the pharmaceutical composition is formulated for delivery to a subject, e.g., for gene editing. Suitable routes of administrating the pharmaceutical composition described herein include, without limitation: topical, subcutaneous, transdermal, intradermal, intralesional, intraarticular, intraperitoneal, intravesical, transmucosal, gingival, intradental, intracochlear, transtympanic, intraorgan, epidural, intrathecal, intramuscular, intravenous, intravascular, intraosseus, periocular, intratumoral, intracerebral, and intracerebroventricular administration.

[0764] In some embodiments, the pharmaceutical composition described herein is administered locally to a diseased site (e.g., tumor site). In some embodiments, the pharmaceutical composition described herein is administered to a subject by injection, by means of a catheter, by means of a suppository, or by means of an implant, the implant being of a porous, non-porous, or gelatinous material, including a membrane, such as a sialastic membrane, or a fiber.

[0765] In other embodiments, the pharmaceutical composition described herein is delivered in a controlled release system. In one embodiment, a pump may be used (see, e.g., Langer, 1990, Science 249:1527-1533; Sefton, 1989, CRC Crit. Ref. Biomed. Eng. 14:201; Buchwald et al., 1980, Surgery 88:507; Saudek et al., 1989, N. Engl. J. Med. 321:574). In another embodiment, polymeric materials can be used. (See, e.g., Medical Applications of Controlled Release (Langer and Wise eds., CRC Press, Boca Raton, Fla., 1974); Controlled Drug Bioavailability, Drug Product Design and Performance (Smolen and Ball eds., Wiley, New York, 1984); Ranger and Peppas, 1983, Macromol. Sci. Rev. Macromol. Chem. 23:61. See also Levy et al., 1985, Science 228:190; During et al., 1989, Ann. Neurol. 25:351; Howard et al., 1989, J. Neurosurg. 71:105.). Other controlled release systems are discussed, for example, in Langer, supra.

[0766] In some embodiments, the pharmaceutical composition is formulated in accordance with routine procedures as a composition adapted for intravenous or subcutaneous administration to a subject, e.g., a human. In some embodiments, pharmaceutical compositions for administration by injection are solutions in sterile isotonic aqueous buffer. Where necessary, the pharmaceutical can also include a solubilizing agent and a local anesthetic such as lignocaine to ease pain at the site of the injection. Generally, the ingredients are supplied either separately or mixed together in unit dosage form, for example, as a dry lyophilized powder or water free concentrate in a hermetically sealed container such as an ampoule or sachette indicating the quantity of active agent. Where the pharmaceutical is to be administered by infusion, it can be dispensed with an infusion bottle containing sterile pharmaceutical grade water or saline. Where the pharmaceutical composition is administered by injection, an ampoule of sterile water for injection or saline can be provided so that the ingredients can be mixed prior to administration.

[0767] A pharmaceutical composition for systemic administration may be a liquid, e.g., sterile saline, lactated Ringer's or Hank's solution. In addition, the pharmaceutical composition can be in solid forms and re-dissolved or suspended immediately prior to use. Lyophilized forms are also contemplated.

[0768] A pharmaceutical composition for systemic administration may be a liquid, e.g., sterile saline, lactated Ringer's or Hank's solution. In addition, the pharmaceutical composition can be in solid forms and re-dissolved or suspended immediately prior to use. Lyophilized forms are also contemplated.

[0769] The pharmaceutical composition can be contained within a lipid particle or vesicle, such as a liposome or microcrystal, which is also suitable for parenteral administration. The particles can be of any suitable structure, such as unilamellar or plurilamellar, so long as compositions are contained therein. Compounds can be entrapped in “stabilized plasmid-lipid particles” (SPLP) containing the fusogenic lipid dioleoylphosphatidylethanolamine (DOPE), low levels (5-10 mol %) of cationic lipid, and stabilized by a polyethyleneglycol (PEG) coating (Zhang Y. P. et al., Gene Ther. 1999, 6:1438-47). Positively charged lipids such as N-[1-(2,3-dioleoyloxi)propyl]-N,N,N-trimethyl-amoniummethylsulfate, or “DOTAP,” are particularly preferred for such particles and vesicles. The preparation of such lipid particles is well known. See, e.g., U.S. Pat. Nos. 4,880,635; 4,906,477; 4,911,928; 4,917,951; 4,920,016; and 4,921,757; each of which is incorporated herein by reference.

[0770] The pharmaceutical composition described herein may be administered or packaged as a unit dose, for example. The term “unit dose” when used in reference to a pharmaceutical composition of the present disclosure refers to physically discrete units suitable as unitary dosage for the subject, each unit containing a predetermined quantity of active material calculated to produce the desired therapeutic effect in association with the required diluent; i.e., carrier, or vehicle.

[0771] Further, the pharmaceutical composition can be provided as a pharmaceutical kit comprising (a) a container containing a compound of the invention in lyophilized form and (b) a second container containing a pharmaceutically acceptable diluent (e.g., sterile water) for injection. The pharmaceutically acceptable diluent can be used for reconstitution or dilution of the lyophilized compound of the invention. Optionally associated with such container(s) can be a notice in the form prescribed by a governmental agency regulating the manufacture, use or sale of pharmaceuticals or biological products, which notice reflects approval by the agency of manufacture, use or sale for human administration.

[0772] In another aspect, an article of manufacture containing materials useful for the treatment of the diseases described above is included. In some embodiments, the article of manufacture comprises a container and a label. Suitable containers include, for example, bottles, vials, syringes, and test tubes. The containers may be formed from a variety of materials such as glass or plastic. In some embodiments, the container holds a composition that is effective for treating a disease described herein and may have a sterile access port. For example, the container may be an intravenous solution bag or a vial having a stopper pierceable by a hypodermic injection needle. The active agent in the composition is a compound of the invention. In some embodiments, the label on or associated with the container indicates that the composition is used for treating the disease of choice. The article of manufacture may further comprise a second container comprising a pharmaceutically-acceptable buffer, such as phosphate-buffered saline, Ringer's solution, or dextrose solution. It may further include other materials desirable from a commercial and user standpoint, including other buffers, diluents, filters, needles, syringes, and package inserts with instructions for use.

[0773] XII. Kits, Vectors, Cells

[0774] Some aspects of this disclosure provide kits comprising a nucleic acid construct comprising a nucleotide sequence encoding a base editor, or a component thereof, including a cytidine deaminase, adenosine deaminase, or an napDNAbp, and/or a guide RNA, for editing a target DNA in a cell. In some embodiments, the nucleotide sequence encodes any of the napDNAbps, cytidine deaminases, and/or adenosine deaminases, and/or guide RNAs provided herein. In some embodiments, the nucleotide sequence comprises a heterologous promoter that drives expression of the napDNAbps, cytidine deaminases, and/or adenosine deaminases, and/or guide RNAs described herein. The nucleotide sequence may further comprise one or more heterologous promoters that drive expression of the napDNAbps, cytidine deaminases, and/or adenosine deaminases, and/or guide RNAs, either from the same nucleotide sequence or separate nucleotide sequences.

[0775] In some embodiments, the kit further comprises an expression construct encoding a guide nucleic acid backbone, e.g., a guide RNA backbone, wherein the construct comprises a cloning site positioned to allow the cloning of a nucleic acid sequence identical or complementary to a target sequence into the guide nucleic acid, e.g., guide RNA backbone.

[0776] The disclosure further provides kits comprising a nucleic acid construct, comprising (a) a nucleotide sequence encoding a napDNAbp (e.g., a Cas9 domain) fused to a deaminase, or a base editor comprising a napDNAbp (e.g., Cas9 domain) and a deaminase as provided herein; and (b) a heterologous promoter that drives expression of the sequence of (a). In some embodiments, the kit further comprises an expression construct encoding a guide nucleic acid backbone, (e.g., a guide RNA backbone), wherein the construct comprises a cloning site positioned to allow the cloning of a nucleic acid sequence identical or complementary to a target sequence into the guide nucleic acid (e.g., guide RNA backbone).

[0777] Some embodiments of this disclosure provide cells comprising any of the base editors or complexes provided herein. In some embodiments, the cells comprise nucleotide constructs that encode any of the base editors provided herein. In some embodiments, the cells comprise any of the nucleotides or vectors provided herein. In some embodiments, a host cell is transiently or non-transiently transfected with one or more vectors described herein. In some embodiments, a cell is transfected as it naturally occurs in a subject. In some embodiments, a cell that is transfected is taken from a subject. In some embodiments, the cell is derived from cells taken from a subject, such as a cell line. A wide variety of cell lines for tissue culture are known in the art.

[0778] In some embodiments, a host cell is transiently or non-transiently transfected with one or more vectors described herein. In some embodiments, a cell is transfected as it naturally occurs in a subject. In some embodiments, a cell that is transfected is taken from a subject. In some embodiments, the cell is derived from cells taken from a subject, such as a cell line. A wide variety of cell lines for tissue culture are known in the art. Examples of cell lines include, but are not limited to, C8161, CCRF-CEM, MOLT, mIMCD-3, NHDF, HeLa-S3, Huh1, Huh4, Huh7, HUVEC, HASMC, HEKn, HEKa, MiaPaCell, Panc1, PC-3, TF1, CTLL-2, C1R, Rat6, CV1, RPTE, A10, T24, J82, A375, ARH-77, Calu1, SW480, SW620, SKOV3, SK-UT, CaCo2, P388D1, SEM-K2, WEHI-231, HB56, TIB55, Jurkat, J45.01, LRMB, Bcl-1, BC-3, IC21, DLD2, Raw264.7, NRK, NRK-52E, MRC5, MEF, Hep G2, HeLa B, HeLa T4, COS, COS-1, COS-6, COS-M6A, BS-C-1 monkey kidney epithelial, BALB/3T3 mouse embryo fibroblast, 3T3 Swiss, 3T3-L1, 132-d5 human fetal fibroblasts; 10.1 mouse fibroblasts, 293-T, 3T3, 721, 9L, A2780, A2780ADR, A2780cis, A 172, A20, A253, A431, A-549, ALC, B16, B35, BCP-1 cells, BEAS-2B, bEnd.3, BHK-21, BR 293. BxPC3. C3H-10T1/2, C6/36, Cal-27, CHO, CHO-7, CHO-IR, CHO-K1, CHO-K2, CHO-T, CHO Dhfr −/−, COR-L23, COR-L23/CPR, COR-L23/5010, COR-L23/R23, COS-7, COV-434, CML T1, CMT, CT26, D17, DH82, DU145, DuCaP, EL4, EM2, EM3, EMT6/AR1, EMT6/AR10.0, FM3, H1299, H69, HB54, HB55, HCA2, HEK-293, HeLa, Hepa1c1c7, HL-60, HMEC, HT-29, Jurkat, JY cells, K562 cells, Ku812, KCL22, KG1, KYO1, LNCap, Ma-Mel 1-48, MC-38, MCF-7, MCF-10A, MDA-MB-231, MDA-MB-468, MDA-MB-435, MDCK II, MDCK 11, MOR/0.2R, MONO-MAC 6, MTD-1A, MyEnd, NCI-H69/CPR, NCI-H69/LX10, NCI-H69/LX20, NCI-H69/LX4, NIH-3T3, NALM-1, NW-145, OPCN/OPCT cell lines, Peer, PNT-1A/PNT 2, RenCa, RIN-5F, RMA/RMAS, Saos-2 cells, Sf-9, SkBr3, T2, T-47D, T84, THP1 cell line, U373, U87, U937, VCaP, Vero cells, WM39, WT-49, X63, YAC-1, YAR, and transgenic varieties thereof. Cell lines are available from a variety of sources known to those with skill in the art (see, e.g., the American Type Culture Collection (ATCC) (Manassas, Va.)). In some embodiments, a cell transfected with one or more vectors described herein is used to establish a new cell line comprising one or more vector-derived sequences. In some embodiments, a cell transiently transfected with the components of a CRISPR system as described herein (such as by transient transfection of one or more vectors, or transfection with RNA), and modified through the activity of a CRISPR complex, is used to establish a new cell line comprising cells containing the modification but lacking any other exogenous sequence. In some embodiments, cells transiently or non-transiently transfected with one or more vectors described herein, or cell lines derived from such cells are used in assessing one or more test compounds.

[0779] In some aspects, the present disclosure provides uses of any one of the base editors described herein and a guide RNA targeting this base editor to a target A:T base pair in a nucleic acid molecule in the manufacture of a kit for nucleic acid editing, wherein the nucleic acid editing comprises contacting the nucleic acid molecule with the base editor and guide RNA under conditions suitable for the substitution of the adenine (A) of the A:T nucleobase pair with an guanine (G). In some embodiments of these uses, the nucleic acid molecule is a double-stranded DNA molecule. In some embodiments, the step of contacting of induces separation of the double-stranded DNA at a target region. In some embodiments, the step of contacting further comprises nicking one strand of the double-stranded DNA, wherein the one strand comprises an unmutated strand that comprises the T of the target A:T nucleobase pair.

[0780] In some aspects, the present disclosure provides uses of any one of the base editors described herein and a guide RNA targeting this base editor to a target A:T base pair in a nucleic acid molecule in the manufacture of a kit for evaluating the off-target effects of a base editor, wherein the step of evaluating the off-target effects comprises contacting the base editor with the nucleic acid molecule and determining off-target effects in accordance with any one of the disclosed methods. In some embodiments of these uses, the nucleic acid molecule is a double-stranded DNA molecule. In some embodiments, the step of contacting of induces separation of the double-stranded DNA at a target region. In some embodiments, the step of contacting further comprises nicking one strand of the double-stranded DNA, wherein the one strand comprises an unmutated strand that comprises the T of the target A:T nucleobase pair.

[0781] In some embodiments of the described uses, the step of contacting is performed in vitro. In other embodiments, the step of contacting is performed in vivo. In some embodiments, the step of contacting is performed in a subject (e.g., a human subject or a non-human animal subject). In some embodiments, the step of contacting is performed in a cell, such as a human or non-human animal cell.

[0782] The present disclosure also provides uses of any one of the base editors described herein as a medicament. The present disclosure also provides uses of any one of the complexes of base editors and guide RNAs described herein as a medicament.

[0783] Some aspects of this disclosure provide kits comprising a nucleic acid construct comprising a nucleotide sequence encoding an adenosine deaminase capable of deaminating an adenosine in a deoxyribonucleic acid (DNA) molecule. In some embodiments, the nucleotide sequence encodes any of the adenosine deaminases provided herein. In some embodiments, the nucleotide sequence comprises a heterologous promoter that drives expression of the adenosine deaminase.

[0784] Some aspects of this disclosure provide kits comprising a nucleic acid construct, comprising (a) a nucleotide sequence encoding a napDNAbp (e.g., a Cas9 domain) fused to an adenosine deaminase, or a fusion protein comprising a napDNAbp (e.g., Cas9 domain) and an adenosine deaminase as provided herein; and (b) a heterologous promoter that drives expression of the sequence of (a). In some embodiments, the kit further comprises an expression construct encoding a guide nucleic acid backbone, (e.g., a guide RNA backbone), wherein the construct comprises a cloning site positioned to allow the cloning of a nucleic acid sequence identical or complementary to a target sequence into the guide nucleic acid (e.g., guide RNA backbone).

[0785] Some aspects of this disclosure provide cells comprising any of the adenosine deaminases, fusion proteins, or complexes provided herein. In some embodiments, the cells comprise a nucleotide that encodes any of the adenosine deaminases or fusion proteins provided herein. In some embodiments, the cells comprise any of the nucleotides or vectors provided herein.

[0786] The description of exemplary embodiments of the systems described above is provided for illustration purposes only and not meant to be limiting. Additional systems, e.g., variations of the exemplary systems described in detail above, are also embraced by this disclosure.

[0787] It should be appreciated however, that additional fusion proteins would be apparent to the skilled artisan based on the present disclosure and knowledge in the art.

[0788] The function and advantage of these and other embodiments of the present invention will be more fully understood from the Examples below. The following Examples are intended to illustrate the benefits of the present invention and to describe particular embodiments, but are not intended to exemplify the full scope of the invention. Accordingly, it will be understood that the Examples are not meant to limit the scope of the invention.

### SEQUENCES

[0789] The following sequences appear in and form a part of this disclosure.

napDNAbp

| | | |
|---|---|---|
| | | SEQ ID |
| DESCRIPTION | SEQUENCE | NO: |

SpCas9 wild type

| | | |
|---|---|---|
| SpCas9 | MDKKYSIGLDIGTNSVGWAVITDEYKVPSKKFKVLGNTDRHSIKKNLIGALLFDSGETAEATRLKRTA | 5 |
| Streptococcus | RRRYTRRKNRICYLQEIFSNEMAKVDDSFFHRLEESFLVEEDKKHERHPIFGNIVDEVAYHEKYPTIY | |
| pyogenes Ml | HLRKKLVDSTDKADLRLIYLALAHMIKFRGHFLIEGDLNPDNSDVDKLFIQLVQTYNQLFEENPINAS | |
| SwissProt | GVDAKAILSARLSKSRRLENLIAQLPGEKKNGLFGNLIALSLGLTPNFKSNFDLAEDAKLQLSKDTYD | |
| Accession No. | DDLDNLLAQIGDQYADLFLAAKNLSDAILLSDILRVNTEITKAPLSASMIKRYDEHHQDLTLLKALVR | |
| Q99ZW2 | QQLPEKYKEIFFDQSKNGYAGYIDGGASQEEFYKFIKPILEKMDGTEELLVKLNREDLLRKQRTFDNG | |
| Wild type | SIPHQIHLGELHAILRRQEDFYPFLKDNREKIEKILTFRIPYYVGPLARGNSRFAWMTRKSEETITPW | |
| | NFEEVVDKGASAQSFIERMTNFDKNLPNEKVLPKHSLLYEYFTVYNELTKVKYVTEGMRKPAFLSGEQ | |
| | KKAIVDLLFKTNRKVTVKQLKEDYFKKIECFDSVEISGVEDRFNASLGTYHDLLKIIKDKDFLDNEEN | |
| | EDILEDIVLTLTLFEDREMIEERLKTYAHLFDDKVMKQLKRRRYTGWGRLSRKLINGIRDKQSGKTIL | |
| | DFLKSDGFANRNFMQLIHDDSLTFKEDIQKAQVSGQGDSLHEHIANLAGSPAIKKGILQTVKVVDELV | |
| | KVMGRHKPENIVIEMARENQTTQKGQKNSRERMKRIEEGIKELGSQILKEHPVENTQLQNEKLYLYYL | |
| | QNGRDMYVDQELDINRLSDYDVDHIVPQSFLKDDSIDNKVLTRSDKNRGKSDNVPSEEVVKKMKNYWR | |
| | QLLNAKLITQRKFDNLTKAERGGLSELDKAGFIKRQLVETRQITKHVAQILDSRMNTKYDENDKLIRE | |
| | VKVITLKSKLVSDFRKDFQFYKVREINNYHHAHDAYLNAVVGTALIKKYPKLESEFVYGDYKVYDVRK | |
| | MIAKSEQEIGKATAKYFFYSNIMNFFKTEITLANGEIRKRPLIETNGETGEIVWDKGRDFATVRKVLS | |
| | MPQVNIVKKTEVQTGGFSKESILPKRNSDKLIARKKDWDPKKYGGFDSPTVAYSVLVVAKVEKGKSKK | |
| | LKSVKELLGITIMERSSFEKNPIDFLEAKGYKEVKKDLIIKLPKYSLFELENGRKRMLASAGELQKGN | |
| | ELALPSKYVNFLYLASHYEKLKGSPEDNEQKQLFVEQHKHYLDEIIEQISEFSKRVILADANLDKVLS | |
| | AYNKHRDKPIREQAENIIHLFTLTNLGAPAAFKYFDTTIDRKRYTSTKEVLDATLIHQSITGLYETRI | |
| | DLSQLGGD | |
| SpCas9 | ATGGATAAAAAATATAGCATTGGCCTGGATATTGGCACCAACAGCGTGGGCTGGGCGGTGATTACCGA | 6 |
| Reverse | TGAATATAAAGTGCCGAGCAAAAAATTTAAAGTGCTGGGCAACACCGATCGCCATAGCATTAAAAAAA | |
| translation of | ACCTGATTGGCGCGCTGCTGTTTGATAGCGGCGAAACCGCGGAAGCGACCCGCCTGAAACGCACCGCG | |
| SwissProt | CGCCGCCGCTATACCCGCCGCAAAAACCGCATTTGCTATCTGCAGGAAATTTTTAGCAACGAAATGGC | |
| Accession No. | GAAAGTGGATGATAGCTTTTTTCATCGCCTGGAAGAAAGCTTTCTGGTGGAAGAAGATAAAAAACATG | |
| Q99ZW2 | AACGCCATCCGATTTTTGGCAACATTGTGGATGAAGTGGCGTATCATGAAAAATATCCGACCATTTAT | |
| Streptococcus | CATCTGCGCAAAAAACTGGTGGATAGCACCGATAAAGCGGATCTGCGCCTGATTTATCTGGCGCTGGC | |
| pyogenes | GCATATGATTAAATTTCGCGGCCATTTTCTGATTGAAGGCGATCTGAACCCGGATAACAGCGATGTGG | |
| | ATAAACTGTTTATTCAGCTGGTGCAGACCTATAACCAGCTGTTTGAAGAAAACCCGATTAACGCGAGC | |
| | GGCGTGGATGCGAAAGCGATTCTGAGCGCGCGCCTGAGCAAAAGCCGCCGCCTGGAAAACCTGATTGC | |
| | GCAGCTGCCGGGCGAAAAAAAAAACGGCCTGTTTGGCAACCTGATTGCGCTGAGCCTGGGCCTGACCC | |
| | CGAACTTTAAAAGCAACTTTGATCTGGCGGAAGATGCGAAACTGCAGCTGAGCAAAGATACCTATGAT | |
| | GATGATCTGGATAACCTGCTGGCGCAGATTGGCGATCAGTATGCGGATCTGTTTCTGGCGGCGAAAAA | |
| | CCTGAGCGATGCGATTCTGCTGAGCGATATTCTGCGCGTGAACACCGAAATTACCAAAGCGCCGCTGA | |
| | GCGCGAGCATGATTAAACGCTATGATGAACATCATCAGGATCTGACCCTGCTGAAAGCGCTGGTGCGC | |
| | CAGCAGCTGCCGGAAAAATATAAAGAAATTTTTTTTGATCAGAGCAAAAACGGCTATGCGGGCTATAT | |
| | TGATGGCGGCGCGAGCCAGGAAGAATTTTATAAATTTATTAAACCGATTCTGGAAAAAATGGATGGCA | |
| | CCGAAGAACTGCTGGTGAAACTGAACCGCGAAGATCTGCTGCGCAAACAGCGCACCTTTGATAACGGC | |
| | AGCATTCCGCATCAGATTCATCTGGGCGAACTGCATGCGATTCTGCGCCGCCAGGAAGATTTTTATCC | |
| | GTTTCTGAAAGATAACCGCGAAAAAATTGAAAAAATTCTGACCTTTCGCATTCCGTATTATGTGGGCC | |
| | CGCTGGCGCGCGGCAACAGCCGCTTTGCGTGGATGACCCGCAAAAGCGAAGAAACCATTACCCCGTGG | |
| | AACTTTGAAGAAGTGGTGGATAAAGGCGCGAGCGCGCAGAGCTTTATTGAACGCATGACCAACTTTGA | |
| | TAAAAACCTGCCGAACGAAAAAGTGCTGCCGAAACATAGCCTGCTGTATGAATATTTTACCGTGTATA | |
| | ACGAACTGACCAAAGTGAAATATGTGACCGAAGGCATGCGCAAACCGGCGTTTCTGAGCGGCGAACAG | |
| | AAAAAAGCGATTGTGGATCTGCTGTTTAAAACCAACCGCAAAGTGACCGTGAAACAGCTGAAAGAAGA | |
| | TTATTTTAAAAAAATTGAATGCTTTGATAGCGTGGAAATTAGCGGCGTGGAAGATCGCTTTAACGCGA | |
| | GCCTGGGCACCTATCATGATCTGCTGAAAATTATTAAAGATAAAGATTTTCTGGATAACGAAGAAAAC | |
| | GAAGATATTCTGGAAGATATTGTGCTGACCCTGACCCTGTTTGAAGATCGCGAAATGATTGAAGAACG | |
| | CCTGAAAACCTATGCGCATCTGTTTGATGATAAAGTGATGAAACAGCTGAAACGCCGCCGCTATACCG | |
| | GCTGGGGCCGCCTGAGCCGCAAACTGATTAACGGCATTCGCGATAAACAGAGCGGCAAAACCATTCTG | |
| | GATTTTCTGAAAAGCGATGGCTTTGCGAACCGCAACTTTATGCAGCTGATTCATGATGATAGCCTGAC | |
| | CTTTAAAGAAGATATTCAGAAAGCGCAGGTGAGCGGCCAGGGCGATAGCCTGCATGAACATATTGCGA | |
| | ACCTGGCGGGCAGCCCGGCGATTAAAAAAGGCATTCTGCAGACCGTGAAAGTGGTGGATGAACTGGTG | |
| | AAAGTGATGGGCCGCCATAAACCGGAAAACATTGTGATTGAAATGGCGCGCGAAAACCAGACCACCCA | |
| | GAAAGGCCAGAAAAACAGCCGCGAACGCATGAAACGCATTGAAGAAGGCATTAAAGAACTGGGCAGCC | |
| | AGATTCTGAAAGAACATCCGGTGGAAAACACCCAGCTGCAGAACGAAAAACTGTATCTGTATTATCTG | |
| | CAGAACGGCCGCGATATGTATGTGGATCAGGAACTGGATATTAACCGCCTGAGCGATTATGATGTGGA | |
| | TCATATTGTGCCGCAGAGCTTTCTGAAAGATGATAGCATTGATAACAAAGTGCTGACCCGCAGCGATA | |
| | AAAACCGCGGCAAAAGCGATAACGTGCCGAGCGAAGAAGTGGTGAAAAAAATGAAAAACTATTGGCGC | |
| | CAGCTGCTGAACGCGAAACTGATTACCCAGCGCAAATTTGATAACCTGACCAAAGCGGAACGCGGCGG | |
| | CCTGAGCGAACTGGATAAAGCGGGCTTTATTAAACGCCAGCTGGTGGAAACCCGCCAGATTACCAAAC | |
| | ATGTGGCGCAGATTCTGGATAGCCGCATGAACACCAAATATGATGAAAACGATAAACTGATTCGCGAA | |
| | GTGAAAGTGATTACCCTGAAAAGCAAACTGGTGAGCGATTTTCGCAAAGATTTTCAGTTTTATAAAGT | |
| | GCGCGAAATTAACAACTATCATCATGCGCATGATGCGTATCTGAACGCGGTGGTGGGCACCGCGCTGA | |
| | TTAAAAAATATCCGAAACTGGAAAGCGAATTTGTGTATGGCGATTATAAAGTGTATGATGTGCGCAAA | |
| | ATGATTGCGAAAAGCGAACAGGAAATTGGCAAAGCGACCGCGAAATATTTTTTTTATAGCAACATTAT | |
| | GAACTTTTTTAAAACCGAAATTACCCTGGCGAACGGCGAAATTCGCAAACGCCCGCTGATTGAAACCA | |
| | ACGGCGAAACCGGCGAAATTGTGTGGGATAAAGGCCGCGATTTTGCGACCGTGCGCAAAGTGCTGAGC | |
| | ATGCCGCAGGTGAACATTGTGAAAAAAACCGAAGTGCAGACCGGCGGCTTTAGCAAAGAAAGCATTCT | |
| | GCCGAAACGCAACAGCGATAAACTGATTGCGCGCAAAAAAGATTGGGATCCGAAAAAATATGGCGGCT | |
| | TTGATAGCCCGACCGTGGCGTATAGCGTGCTGGTGGTGGCGAAAGTGGAAAAAGGCAAAAGCAAAAAA | |
| | CTGAAAAGCGTGAAAGAACTGCTGGGCATTACCATTATGGAACGCAGCAGCTTTGAAAAAAACCCGAT | |
| | TGATTTTCTGGAAGCGAAAGGCTATAAAGAAGTGAAAAAAGATCTGATTATTAAACTGCCGAAATATA | |
| | GCCTGTTTGAACTGGAAAACGGCCGCAAACGCATGCTGGCGAGCGCGGGCGAACTGCAGAAAGGCAAC | |
| | GAACTGGCGCTGCCGAGCAAATATGTGAACTTTCTGTATCTGGCGAGCCATTATGAAAAACTGAAAGG | |
| | CAGCCCGGAAGATAACGAACAGAAACAGCTGTTTGTGGAACAGCATAAACATTATCTGGATGAAATTA | |
| | TTGAACAGATTAGCGAATTTAGCAAACGCGTGATTCTGGCGGATGCGAACCTGGATAAAGTGCTGAGC | |
| | GCGTATAACAAACATCGCGATAAACCGATTCGCGAACAGGCGGAAAACATTATTCATCTGTTTACCCT | |
| | GACCAACCTGGGCGCGCCGGCGGCGTTTAAATATTTTGATACCACCATTGATCGCAAACGCTATACCA | |
| | GCACCAAAGAAGTGCTGGATGCGACCCTGATTCATCAGAGCATTACCGGCCTGTATGAAACCCGCATT | |
| | GATCTGAGCCAGCTGGGCGGCGAT | |
| SpCas9 | ATGGATAAGAAATACTCAATAGGCTTAGATATCGGCACAAATAGCGTCGGATGGGCGGTGATCACTGA | 7 |
| Streptococcus | TGATTATAAGGTTCCGTCTAAAAAGTTCAAGGTTCTGGGAAATACAGACCGCCACAGTATCAAAAAAA | |
| pyogenes | ATCTTATAGGGGCTCTTTTATTTGGCAGTGGAGAGACAGCGGAAGCGACTCGTCTCAAACGGACAGCT | |
| MGAS1882 wild | CGTAGAAGGTATACACGTCGGAAGAATCGTATTTGTTATCTACAGGAGATTTTTTCAAATGAGATGGC | |
| type | GAAAGTAGATGATAGTTTCTTTCATCGACTTGAAGAGTCTTTTTTGGTGGAAGAAGACAAGAAGCATG | |
| NC_017053.1 | AACGTCATCCTATTTTTGGAAATATAGTAGATGAAGTTGCTTATCATGAGAAATATCCAACTATCTAT | |
| | CATCTGCGAAAAAAATTGGCAGATTCTACTGATAAAGCGGATTTGCGCTTAATCTATTTGGCCTTAGC | |
| | GCATATGATTAAGTTTCGTGGTCATTTTTTGATTGAGGGAGATTTAAATCCTGATAATAGTGATGTGG | |
| | ACAAACTATTTATCCAGTTGGTACAAATCTACAATCAATTATTTGAAGAAAACCCTATTAACGCAAGT | |
| | AGAGTAGATGCTAAAGCGATTCTTTCTGCACGATTGAGTAAATCAAGACGATTAGAAAATCTCATTGC | |
| | TCAGCTCCCCGGTGAGAAGAGAAATGGCTTGTTTGGGAATCTCATTGCTTTGTCATTGGGATTGACCC | |
| | CTAATTTTAAATCAAATTTTGATTTGGCAGAAGATGCTAAATTACAGCTTTCAAAAGATACTTACGAT | |
| | GATGATTTAGATAATTTATTGGCGCAAATTGGAGATCAATATGCTGATTTGTTTTTGGCAGCTAAGAA | |
| | TTTATCAGATGCTATTTTACTTTCAGATATCCTAAGAGTAAATAGTGAAATAACTAAGGCTCCCCTAT | |
| | CAGCTTCAATGATTAAGCGCTACGATGAACATCATCAAGACTTGACTCTTTTAAAAGCTTTAGTTCGA | |
| | CAACAACTTCCAGAAAAGTATAAAGAAATCTTTTTTGATCAATCAAAAAACGGATATGCAGGTTATAT | |
| | TGATGGGGGAGCTAGCCAAGAAGAATTTTATAAATTTATCAAACCAATTTTAGAAAAAATGGATGGTA | |
| | CTGAGGAATTATTGGTGAAACTAAATCGTGAAGATTTGCTGCGCAAGCAACGGACCTTTGACAACGGC | |
| | TCTATTCCCCATCAAATTCACTTGGGTGAGCTGCATGCTATTTTGAGAAGACAAGAAGACTTTTATCC | |
| | ATTTTTAAAAGACAATCGTGAGAAGATTGAAAAAATCTTGACTTTTCGAATTCCTTATTATGTTGGTC | |
| | CATTGGCGCGTGGCAATAGTCGTTTTGCATGGATGACTCGGAAGTCTGAAGAAACAATTACCCCATGG | |
| | AATTTTGAAGAAGTTGTCGATAAAGGTGCTTCAGCTCAATCATTTATTGAACGCATGACAAACTTTGA | |
| | TAAAAATCTTCCAAATGAAAAAGTACTACCAAAACATAGTTTGCTTTATGAGTATTTTACGGTTTATA | |
| | ACGAATTGACAAAGGTCAAATATGTTACTGAGGGAATGCGAAAACCAGCATTTCTTTCAGGTGAACAG | |
| | AAGAAAGCCATTGTTGATTTACTCTTCAAAACAAATCGAAAAGTAACCGTTAAGCAATTAAAAGAAGA | |
| | TTATTTCAAAAAAATAGAATGTTTTGATAGTGTTGAAATTTCAGGAGTTGAAGATAGATTTAATGCTT | |
| | CATTAGGCGCCTACCATGATTTGCTAAAAATTATTAAAGATAAAGATTTTTTGGATAATGAAGAAAAT | |
| | GAAGATATCTTAGAGGATATTGTTTTAACATTGACCTTATTTGAAGATAGGGGGATGATTGAGGAAAG | |
| | ACTTAAAACATATGCTCACCTCTTTGATGATAAGGTGATGAAACAGCTTAAACGTCGCCGTTATACTG | |
| | GTTGGGGACGTTTGTCTCGAAAATTGATTAATGGTATTAGGGATAAGCAATCTGGCAAAACAATATTA | |
| | GATTTTTTGAAATCAGATGGTTTTGCCAATCGCAATTTTATGCAGCTGATCCATGATGATAGTTTGAC | |
| | ATTTAAAGAAGATATTCAAAAAGCACAGGTGTCTGGACAAGGCCATAGTTTACATGAACAGATTGCTA | |
| | ACTTAGCTGGCAGTCCTGCTATTAAAAAAGGTATTTTACAGACTGTAAAAATTGTTGATGAACTGGTC | |
| | AAAGTAATGGGGCATAAGCCAGAAAATATCGTTATTGAAATGGCACGTGAAAATCAGACAACTCAAAA | |
| | GGGCCAGAAAAATTCGCGAGAGCGTATGAAACGAATCGAAGAAGGTATCAAAGAATTAGGAAGTCAGA | |
| | TTCTTAAAGAGCATCCTGTTGAAAATACTCAATTGCAAAATGAAAAGCTCTATCTCTATTATCTACAA | |
| | AATGGAAGAGACATGTATGTGGACCAAGAATTAGATATTAATCGTTTAAGTGATTATGATGTCGATCA | |
| | CATTGTTCCACAAAGTTTCATTAAAGACGATTCAATAGACAATAAGGTACTAACGCGTTCTGATAAAA | |
| | ATCGTGGTAAATCGGATAACGTTCCAAGTGAAGAAGTAGTCAAAAAGATGAAAAACTATTGGAGACAA | |
| | CTTCTAAACGCCAAGTTAATCACTCAACGTAAGTTTGATAATTTAACGAAAGCTGAACGTGGAGGTTT | |
| | GAGTGAACTTGATAAAGCTGGTTTTATCAAACGCCAATTGGTTGAAACTCGCCAAATCACTAAGCATG | |
| | TGGCACAAATTTTGGATAGTCGCATGAATACTAAATACGATGAAAATGATAAACTTATTCGAGAGGTT | |
| | AAAGTGATTACCTTAAAATCTAAATTAGTTTCTGACTTCCGAAAAGATTTCCAATTCTATAAAGTACG | |
| | TGAGATTAACAATTACCATCATGCCCATGATGCGTATCTAAATGCCGTCGTTGGAACTGCTTTGATTA | |
| | AGAAATATCCAAAACTTGAATCGGAGTTTGTCTATGGTGATTATAAAGTTTATGATGTTCGTAAAATG | |
| | ATTGCTAAGTCTGAGCAAGAAATAGGCAAAGCAACCGCAAAATATTTCTTTTACTCTAATATCATGAA | |
| | CTTCTTCAAAACAGAAATTACACTTGCAAATGGAGAGATTCGCAAACGCCCTCTAATCGAAACTAATG | |
| | GGGAAACTGGAGAAATTGTCTGGGATAAAGGGCGAGATTTTGCCACAGTGCGCAAAGTATTGTCCATG | |
| | CCCCAAGTCAATATTGTCAAGAAAACAGAAGTACAGACAGGCGGATTCTCCAAGGAGTCAATTTTACC | |
| | AAAAAGAAATTCGGACAAGCTTATTGCTCGTAAAAAAGACTGGGATCCAAAAAAATATGGTGGTTTTG | |
| | ATAGTCCAACGGTAGCTTATTCAGTCCTAGTGGTTGCTAAGGTGGAAAAAGGGAAATCGAAGAAGTTA | |
| | AAATCCGTTAAAGAGTTACTAGGGATCACAATTATGGAAAGAAGTTCCTTTGAAAAAAATCCGATTGA | |
| | CTTTTTAGAAGCTAAAGGATATAAGGAAGTTAAAAAAGACTTAATCATTAAACTACCTAAATATAGTC | |
| | TTTTTGAGTTAGAAAACGGTCGTAAACGGATGCTGGCTAGTGCCGGAGAATTACAAAAAGGAAATGAG | |
| | CTGGCTCTGCCAAGCAAATATGTGAATTTTTTATATTTAGCTAGTCATTATGAAAAGTTGAAGGGTAG | |
| | TCCAGAAGATAACGAACAAAAACAATTGTTTGTGGAGCAGCATAAGCATTATTTAGATGAGATTATTG | |
| | AGCAAATCAGTGAATTTTCTAAGCGTGTTATTTTAGCAGATGCCAATTTAGATAAAGTTCTTAGTGCA | |
| | TATAACAAACATAGAGACAAACCAATACGTGAACAAGCAGAAAATATTATTCATTTATTTACGTTGAC | |
| | GAATCTTGGAGCTCCCGCTGCTTTTAAATATTTTGATACAACAATTGATCGTAAACGATATACGTCTA | |
| | CAAAAGAAGTTTTAGATGCCACTCTTATCCATCAATCCATCACTGGTCTTTATGAAACACGCATTGAT | |
| | TTGAGTCAGCTAGGAGGTGACTGA | |
| SpCas9 | MDKKYSIGLDIGTNSVGWAVITDDYKVPSKKFKVLGNTDRHSIKKNLIGALLFGSGETAEATRLKRTA | 8 |
| Streptococcus | RRRYTRRKNRICYLQEIFSNEMAKVDDSFFHRLEESFLVEEDKKHERHPIFGNIVDEVAYHEKYPTIY | |
| pyogenes | HLRKKLADSTDKADLRLIYLALAHMIKFRGHFLIEGDLNPDNSDVDKLFIQLVQIYNQLFEENPINAS | |
| MGAS1882 wild | RVDAKAILSARLSKSRRLENLIAQLPGEKRNGLFGNLIALSLGLTPNFKSNFDLAEDAKLQLSKDTYD | |
| type | DDLDNLLAQIGDQYADLFLAAKNLSDAILLSDILRVNSEITKAPLSASMIKRYDEHHQDLTLLKALVR | |
| NC_017053.1 | QQLPEKYKEIFFDQSKNGYAGYIDGGASQEEFYKFIKPILEKMDGTEELLVKLNREDLLRKQRTFDNG | |
| | SIPHQIHLGELHAILRRQEDFYPFLKDNREKIEKILTFRIPYYVGPLARGNSRFAWMTRKSEETITPW | |
| | NFEEVVDKGASAQSFIERMTNFDKNLPNEKVLPKHSLLYEYFTVYNELTKVKYVTEGMRKPAFLSGEQ | |
| | KKAIVDLLFKTNRKVTVKQLKEDYFKKIECFDSVEISGVEDRFNASLGAYHDLLKIIKDKDFLDNEEN | |
| | EDILEDIVLTLTLFEDRGMIEERLKTYAHLFDDKVMKQLKRRRYTGWGRLSRKLINGIRDKQSGKTIL | |
| | DFLKSDGFANRNFMQLIHDDSLTFKEDIQKAQVSGQGHSLHEQIANLAGSPAIKKGILQTVKIVDELV | |
| | KVMGHKPENIVIEMARENQTTQKGQKNSRERMKRIEEGIKELGSQILKEHPVENTQLQNEKLYLYYLQ | |
| | NGRDMYVDQELDINRLSDYDVDHIVPQSFIKDDSIDNKVLTRSDKNRGKSDNVPSEEVVKKMKNYWRQ | |
| | LLNAKLITQRKFDNLTKAERGGLSELDKAGFIKRQLVETRQITKHVAQILDSRMNTKYDENDKLIREV | |
| | KVITLKSKLVSDFRKDFQFYKVREINNYHHAHDAYLNAVVGTALIKKYPKLESEFVYGDYKVYDVRKM | |
| | IAKSEQEIGKATAKYFFYSNIMNFFKTEITLANGEIRKRPLIETNGETGEIVWDKGRDFATVRKVLSM | |
| | PQVNIVKKTEVQTGGFSKESILPKRNSDKLIARKKDWDPKKYGGFDSPTVAYSVLVVAKVEKGKSKKL | |
| | KSVKELLGITIMERSSFEKNPIDFLEAKGYKEVKKDLIIKLPKYSLFELENGRKRMLASAGELQKGNE | |
| | LALPSKYVNFLYLASHYEKLKGSPEDNEQKQLFVEQHKHYLDEIIEQISEFSKRVILADANLDKVLSA | |
| | YNKHRDKPIREQAENIIHLFTLTNLGAPAAFKYFDTTIDRKRYTSTKEVLDATLIHQSITGLYETRID | |
| | LSQLGGD | |
| SpCas9 | ATGGATAAAAAGTATTCTATTGGTTTAGACATCGGCACTAATTCCGTTGGATGGGCTGTCATAACCGA | 9 |
| Streptococcus | TGAATACAAAGTACCTTCAAAGAAATTTAAGGTGTTGGGGAACACAGACCGTCATTCGATTAAAAAGA | |
| pyogenes wild | ATCTTATCGGTGCCCTCCTATTCGATAGTGGCGAAACGGCAGAGGCGACTCGCCTGAAACGAACCGCT | |
| type | CGGAGAAGGTATACACGTCGCAAGAACCGAATATGTTACTTACAAGAAATTTTTAGCAATGAGATGGC | |
| SWBC2D7W014 | CAAAGTTGACGATTCTTTCTTTCACCGTTTGGAAGAGTCCTTCCTTGTCGAAGAGGACAAGAAACATG | |
| | AACGGCACCCCATCTTTGGAAACATAGTAGATGAGGTGGCATATCATGAAAAGTACCCAACGATTTAT | |
| | CACCTCAGAAAAAAGCTAGTTGACTCAACTGATAAAGCGGACCTGAGGTTAATCTACTTGGCTCTTGC | |
| | CCATATGATAAAGTTCCGTGGGCACTTTCTCATTGAGGGTGATCTAAATCCGGACAACTCGGATGTCG | |
| | ACAAACTGTTCATCCAGTTAGTACAAACCTATAATCAGTTGTTTGAAGAGAACCCTATAAATGCAAGT | |
| | GGCGTGGATGCGAAGGCTATTCTTAGCGCCCGCCTCTCTAAATCCCGACGGCTAGAAAACCTGATCGC | |
| | ACAATTACCCGGAGAGAAGAAAAATGGGTTGTTCGGTAACCTTATAGCGCTCTCACTAGGCCTGACAC | |
| | CAAATTTTAAGTCGAACTTCGACTTAGCTGAAGATGCCAAATTGCAGCTTAGTAAGGACACGTACGAT | |
| | GACGATCTCGACAATCTACTGGCACAAATTGGAGATCAGTATGCGGACTTATTTTTGGCTGCCAAAAA | |
| | CCTTAGCGATGCAATCCTCCTATCTGACATACTGAGAGTTAATACTGAGATTACCAAGGCGCCGTTAT | |
| | CCGCTTCAATGATCAAAAGGTACGATGAACATCACCAAGACTTGACACTTCTCAAGGCCCTAGTCCGT | |
| | CAGCAACTGCCTGAGAAATATAAGGAAATATTCTTTGATCAGTCGAAAAACGGGTACGCAGGTTATAT | |
| | TGACGGCGGAGCGAGTCAAGAGGAATTCTACAAGTTTATCAAACCCATATTAGAGAAGATGGATGGGA | |
| | CGGAAGAGTTGCTTGTAAAACTCAATCGCGAAGATCTACTGCGAAAGCAGCGGACTTTCGACAACGGT | |
| | AGCATTCCACATCAAATCCACTTAGGCGAATTGCATGCTATACTTAGAAGGCAGGAGGATTTTTATCC | |
| | GTTCCTCAAAGACAATCGTGAAAAGATTGAGAAAATCCTAACCTTTCGCATACCTTACTATGTGGGAC | |
| | CCCTGGCCCGAGGGAACTCTCGGTTCGCATGGATGACAAGAAAGTCCGAAGAAACGATTACTCCATGG | |
| | AATTTTGAGGAAGTTGTCGATAAAGGTGCGTCAGCTCAATCGTTCATCGAGAGGATGACCAACTTTGA | |
| | CAAGAATTTACCGAACGAAAAAGTATTGCCTAAGCACAGTTTACTTTACGAGTATTTCACAGTGTACA | |
| | ATGAACTCACGAAAGTTAAGTATGTCACTGAGGGCATGCGTAAACCCGCCTTTCTAAGCGGAGAACAG | |
| | AAGAAAGCAATAGTAGATCTGTTATTCAAGACCAACCGCAAAGTGACAGTTAAGCAATTGAAAGAGGA | |
| | CTACTTTAAGAAAATTGAATGCTTCGATTCTGTCGAGATCTCCGGGGTAGAAGATCGATTTAATGCGT | |
| | CACTTGGTACGTATCATGACCTCCTAAAGATAATTAAAGATAAGGACTTCCTGGATAACGAAGAGAAT | |
| | GAAGATATCTTAGAAGATATAGTGTTGACTCTTACCCTCTTTGAAGATCGGGAAATGATTGAGGAAAG | |
| | ACTAAAAACATACGCTCACCTGTTCGACGATAAGGTTATGAAACAGTTAAAGAGGCGTCGCTATACGG | |
| | GCTGGGGACGATTGTCGCGGAAACTTATCAACGGGATAAGAGACAAGCAAAGTGGTAAAACTATTCTC | |
| | GATTTTCTAAAGAGCGACGGCTTCGCCAATAGGAACTTTATGCAGCTGATCCATGATGACTCTTTAAC | |
| | CTTCAAAGAGGATATACAAAAGGCACAGGTTTCCGGACAAGGGGACTCATTGCACGAACATATTGCGA | |
| | ATCTTGCTGGTTCGCCAGCCATCAAAAAGGGCATACTCCAGACAGTCAAAGTAGTGGATGAGCTAGTT | |
| | AAGGTCATGGGACGTCACAAACCGGAAAACATTGTAATCGAGATGGCACGCGAAAATCAAACGACTCA | |
| | GAAGGGGCAAAAAAACAGTCGAGAGCGGATGAAGAGAATAGAAGAGGGTATTAAAGAACTGGGCAGCC | |
| | AGATCTTAAAGGAGCATCCTGTGGAAAATACCCAATTGCAGAACGAGAAACTTTACCTCTATTACCTA | |
| | CAAAATGGAAGGGACATGTATGTTGATCAGGAACTGGACATAAACCGTTTATCTGATTACGACGTCGA | |
| | TCACATTGTACCCCAATCCTTTTTGAAGGACGATTCAATCGACAATAAAGTGCTTACACGCTCGGATA | |
| | AGAACCGAGGGAAAAGTGACAATGTTCCAAGCGAGGAAGTCGTAAAGAAAATGAAGAACTATTGGCGG | |
| | CAGCTCCTAAATGCGAAACTGATAACGCAAAGAAAGTTCGATAACTTAACTAAAGCTGAGAGGGGTGG | |
| | CTTGTCTGAACTTGACAAGGCCGGATTTATTAAACGTCAGCTCGTGGAAACCCGCCAAATCACAAAGC | |
| | ATGTTGCACAGATACTAGATTCCCGAATGAATACGAAATACGACGAGAACGATAAGCTGATTCGGGAA | |
| | GTCAAAGTAATCACTTTAAAGTCAAAATTGGTGTCGGACTTCAGAAAGGATTTTCAATTCTATAAAGT | |
| | TAGGGAGATAAATAACTACCACCATGCGCACGACGCTTATCTTAATGCCGTCGTAGGGACCGCACTCA | |
| | TTAAGAAATACCCGAAGCTAGAAAGTGAGTTTGTGTATGGTGATTACAAAGTTTATGACGTCCGTAAG | |
| | ATGATCGCGAAAAGCGAACAGGAGATAGGCAAGGCTACAGCCAAATACTTCTTTTATTCTAACATTAT | |
| | GAATTTCTTTAAGACGGAAATCACTCTGGCAAACGGAGAGATACGCAAACGACCTTTAATTGAAACCA | |
| | ATGGGGAGACAGGTGAAATCGTATGGGATAAGGGCCGGGACTTCGCGACGGTGAGAAAAGTTTTGTCC | |
| | ATGCCCCAAGTCAACATAGTAAAGAAAACTGAGGTGCAGACCGGAGGGTTTTCAAAGGAATCGATTCT | |
| | TCCAAAAAGGAATAGTGATAAGCTCATCGCTCGTAAAAAGGACTGGGACCCGAAAAAGTACGGTGGCT | |
| | TCGATAGCCCTACAGTTGCCTATTCTGTCCTAGTAGTGGCAAAAGTTGAGAAGGGAAAATCCAAGAAA | |
| | CTGAAGTCAGTCAAAGAATTATTGGGGATAACGATTATGGAGCGCTCGTCTTTTGAAAAGAACCCCAT | |
| | CGACTTCCTTGAGGCGAAAGGTTACAAGGAAGTAAAAAAGGATCTCATAATTAAACTACCAAAGTATA | |
| | GTCTGTTTGAGTTAGAAAATGGCCGAAAACGGATGTTGGCTAGCGCCGGAGAGCTTCAAAAGGGGAAC | |
| | GAACTCGCACTACCGTCTAAATACGTGAATTTCCTGTATTTAGCGTCCCATTACGAGAAGTTGAAAGG | |
| | TTCACCTGAAGATAACGAACAGAAGCAACTTTTTGTTGAGCAGCACAAACATTATCTCGACGAAATCA | |
| | TAGAGCAAATTTCGGAATTCAGTAAGAGAGTCATCCTAGCTGATGCCAATCTGGACAAAGTATTAAGC | |
| | GCATACAACAAGCACAGGGATAAACCCATACGTGAGCAGGCGGAAAATATTATCCATTTGTTTACTCT | |
| | TACCAACCTCGGCGCTCCAGCCGCATTCAAGTATTTTGACACAACGATAGATCGCAAACGATACACTT | |
| | CTACCAAGGAGGTGCTAGACGCGACACTGATTCACCAATCCATCACGGGATTATATGAAACTCGGATA | |
| | GATTTGTCACAGCTTGGGGGTGACGGATCCCCCAAGAAGAAGAGGAAAGTCTCGAGCGACTACAAAGA | |
| | CCATGACGGTGATTATAAAGATCATGACATCGATTACAAGGATGACGATGACAAGGCTGCAGGA | |
| SpCas9 | MDKKYSIGLDIGTNSVGWAVITDEYKVPSKKFKVLGNTDRHSIKKNLIGALLFDSGETAEATRLKRTA | 10 |
| Streptococcus | RRRYTRRKNRICYLQEIFSNEMAKVDDSFFHRLEESFLVEEDKKHERHPIFGNIVDEVAYHEKYPTIY | |
| pyogenes wild | HLRKKLVDSTDKADLRLIYLALAHMIKFRGHFLIEGDLNPDNSDVDKLFIQLVQTYNQLFEENPINAS | |
| type | GVDAKAILSARLSKSRRLENLIAQLPGEKKNGLFGNLIALSLGLTPNFKSNFDLAEDAKLQLSKDTYD | |
| Encoded | DDLDNLLAQIGDQYADLFLAAKNLSDAILLSDILRVNTEITKAPLSASMIKRYDEHHQDLTLLKALVR | |
| product of | QQLPEKYKEIFFDQSKNGYAGYIDGGASQEEFYKFIKPILEKMDGTEELLVKLNREDLLRKQRTFDNG | |
| SWBC2D7W014 | SIPHQIHLGELHAILRRQEDFYPFLKDNREKIEKILTFRIPYYVGPLARGNSRFAWMTRKSEETITPW | |
| | NFEEVVDKGASAQSFIERMTNFDKNLPNEKVLPKHSLLYEYFTVYNELTKVKYVTEGMRKPAFLSGEQ | |
| | KKAIVDLLFKTNRKVTVKQLKEDYFKKIECFDSVEISGVEDRFNASLGTYHDLLKIIKDKDFLDNEEN | |
| | EDILEDIVLTLTLFEDREMIEERLKTYAHLFDDKVMKQLKRRRYTGWGRLSRKLINGIRDKQSGKTIL | |
| | DFLKSDGFANRNFMQLIHDDSLTFKEDIQKAQVSGQGDSLHEHIANLAGSPAIKKGILQTVKVVDELV | |
| | KVMGRHKPENIVIEMARENQTTQKGQKNSRERMKRIEEGIKELGSQILKEHPVENTQLQNEKLYLYYL | |
| | QNGRDMYVDQELDINRLSDYDVDHIVPQSFLKDDSIDNKVLTRSDKNRGKSDNVPSEEVVKKMKNYWR | |
| | QLLNAKLITQRKFDNLTKAERGGLSELDKAGFIKRQLVETRQITKHVAQILDSRMNTKYDENDKLIRE | |
| | VKVITLKSKLVSDFRKDFQFYKVREINNYHHAHDAYLNAVVGTALIKKYPKLESEFVYGDYKVYDVRK | |
| | MIAKSEQEIGKATAKYFFYSNIMNFFKTEITLANGEIRKRPLIETNGETGEIVWDKGRDFATVRKVLS | |
| | MPQVNIVKKTEVQTGGFSKESILPKRNSDKLIARKKDWDPKKYGGFDSPTVAYSVLVVAKVEKGKSKK | |
| | LKSVKELLGITIMERSSFEKNPIDFLEAKGYKEVKKDLIIKLPKYSLFELENGRKRMLASAGELQKGN | |
| | ELALPSKYVNFLYLASHYEKLKGSPEDNEQKQLFVEQHKHYLDEIIEQISEFSKRVILADANLDKVLS | |
| | AYNKHRDKPIREQAENIIHLFTLTNLGAPAAFKYFDTTIDRKRYTSTKEVLDATLIHQSITGLYETRI | |
| | DLSQLGGDGSPKKKRKVSSDYKDHDGDYKDHDIDYKDDDDKAAG | |
| SpCas9 | ATGGATAAGAAATACTCAATAGGCTTAGATATCGGCACAAATAGCGTCGGATGGGCGGTGATCACTGA | 11 |
| Streptococcus | TGAATATAAGGTTCCGTCTAAAAAGTTCAAGGTTCTGGGAAATACAGACCGCCACAGTATCAAAAAAA | |
| pyogenes M1GAS | ATCTTATAGGGGCTCTTTTATTTGACAGTGGAGAGACAGCGGAAGCGACTCGTCTCAAACGGACAGCT | |
| wild type | CGTAGAAGGTATACACGTCGGAAGAATCGTATTTGTTATCTACAGGAGATTTTTTCAAATGAGATGGC | |
| NC_002737.2 | GAAAGTAGATGATAGTTTCTTTCATCGACTTGAAGAGTCTTTTTTGGTGGAAGAAGACAAGAAGCATG | |
| | AACGTCATCCTATTTTTGGAAATATAGTAGATGAAGTTGCTTATCATGAGAAATATCCAACTATCTAT | |
| | CATCTGCGAAAAAAATTGGTAGATTCTACTGATAAAGCGGATTTGCGCTTAATCTATTTGGCCTTAGC | |
| | GCATATGATTAAGTTTCGTGGTCATTTTTTGATTGAGGGAGATTTAAATCCTGATAATAGTGATGTGG | |
| | ACAAACTATTTATCCAGTTGGTACAAACCTACAATCAATTATTTGAAGAAAACCCTATTAACGCAAGT | |
| | GGAGTAGATGCTAAAGCGATTCTTTCTGCACGATTGAGTAAATCAAGACGATTAGAAAATCTCATTGC | |
| | TCAGCTCCCCGGTGAGAAGAAAAATGGCTTATTTGGGAATCTCATTGCTTTGTCATTGGGTTTGACCC | |
| | CTAATTTTAAATCAAATTTTGATTTGGCAGAAGATGCTAAATTACAGCTTTCAAAAGATACTTACGAT | |
| | GATGATTTAGATAATTTATTGGCGCAAATTGGAGATCAATATGCTGATTTGTTTTTGGCAGCTAAGAA | |
| | TTTATCAGATGCTATTTTACTTTCAGATATCCTAAGAGTAAATACTGAAATAACTAAGGCTCCCCTAT | |
| | CAGCTTCAATGATTAAACGCTACGATGAACATCATCAAGACTTGACTCTTTTAAAAGCTTTAGTTCGA | |
| | CAACAACTTCCAGAAAAGTATAAAGAAATCTTTTTTGATCAATCAAAAAACGGATATGCAGGTTATAT | |
| | TGATGGGGGAGCTAGCCAAGAAGAATTTTATAAATTTATCAAACCAATTTTAGAAAAAATGGATGGTA | |
| | CTGAGGAATTATTGGTGAAACTAAATCGTGAAGATTTGCTGCGCAAGCAACGGACCTTTGACAACGGC | |
| | TCTATTCCCCATCAAATTCACTTGGGTGAGCTGCATGCTATTTTGAGAAGACAAGAAGACTTTTATCC | |
| | ATTTTTAAAAGACAATCGTGAGAAGATTGAAAAAATCTTGACTTTTCGAATTCCTTATTATGTTGGTC | |
| | CATTGGCGCGTGGCAATAGTCGTTTTGCATGGATGACTCGGAAGTCTGAAGAAACAATTACCCCATGG | |
| | AATTTTGAAGAAGTTGTCGATAAAGGTGCTTCAGCTCAATCATTTATTGAACGCATGACAAACTTTGA | |
| | TAAAAATCTTCCAAATGAAAAAGTACTACCAAAACATAGTTTGCTTTATGAGTATTTTACGGTTTATA | |
| | ACGAATTGACAAAGGTCAAATATGTTACTGAAGGAATGCGAAAACCAGCATTTCTTTCAGGTGAACAG | |
| | AAGAAAGCCATTGTTGATTTACTCTTCAAAACAAATCGAAAAGTAACCGTTAAGCAATTAAAAGAAGA | |
| | TTATTTCAAAAAAATAGAATGTTTTGATAGTGTTGAAATTTCAGGAGTTGAAGATAGATTTAATGCTT | |
| | CATTAGGTACCTACCATGATTTGCTAAAAATTATTAAAGATAAAGATTTTTTGGATAATGAAGAAAAT | |
| | GAAGATATCTTAGAGGATATTGTTTTAACATTGACCTTATTTGAAGATAGGGAGATGATTGAGGAAAG | |
| | ACTTAAAACATATGCTCACCTCTTTGATGATAAGGTGATGAAACAGCTTAAACGTCGCCGTTATACTG | |
| | GTTGGGGACGTTTGTCTCGAAAATTGATTAATGGTATTAGGGATAAGCAATCTGGCAAAACAATATTA | |
| | GATTTTTTGAAATCAGATGGTTTTGCCAATCGCAATTTTATGCAGCTGATCCATGATGATAGTTTGAC | |
| | ATTTAAAGAAGACATTCAAAAAGCACAAGTGTCTGGACAAGGCGATAGTTTACATGAACATATTGCAA | |
| | ATTTAGCTGGTAGCCCTGCTATTAAAAAAGGTATTTTACAGACTGTAAAAGTTGTTGATGAATTGGTC | |
| | AAAGTAATGGGGCGGCATAAGCCAGAAAATATCGTTATTGAAATGGCACGTGAAAATCAGACAACTCA | |
| | AAAGGGCCAGAAAAATTCGCGAGAGCGTATGAAACGAATCGAAGAAGGTATCAAAGAATTAGGAAGTC | |
| | AGATTCTTAAAGAGCATCCTGTTGAAAATACTCAATTGCAAAATGAAAAGCTCTATCTCTATTATCTC | |
| | CAAAATGGAAGAGACATGTATGTGGACCAAGAATTAGATATTAATCGTTTAAGTGATTATGATGTCGA | |
| | TCACATTGTTCCACAAAGTTTCCTTAAAGACGATTCAATAGACAATAAGGTCTTAACGCGTTCTGATA | |
| | AAAATCGTGGTAAATCGGATAACGTTCCAAGTGAAGAAGTAGTCAAAAAGATGAAAAACTATTGGAGA | |
| | CAACTTCTAAACGCCAAGTTAATCACTCAACGTAAGTTTGATAATTTAACGAAAGCTGAACGTGGAGG | |
| | TTTGAGTGAACTTGATAAAGCTGGTTTTATCAAACGCCAATTGGTTGAAACTCGCCAAATCACTAAGC | |
| | ATGTGGCACAAATTTTGGATAGTCGCATGAATACTAAATACGATGAAAATGATAAACTTATTCGAGAG | |
| | GTTAAAGTGATTACCTTAAAATCTAAATTAGTTTCTGACTTCCGAAAAGATTTCCAATTCTATAAAGT | |
| | ACGTGAGATTAACAATTACCATCATGCCCATGATGCGTATCTAAATGCCGTCGTTGGAACTGCTTTGA | |
| | TTAAGAAATATCCAAAACTTGAATCGGAGTTTGTCTATGGTGATTATAAAGTTTATGATGTTCGTAAA | |
| | ATGATTGCTAAGTCTGAGCAAGAAATAGGCAAAGCAACCGCAAAATATTTCTTTTACTCTAATATCAT | |
| | GAACTTCTTCAAAACAGAAATTACACTTGCAAATGGAGAGATTCGCAAACGCCCTCTAATCGAAACTA | |
| | ATGGGGAAACTGGAGAAATTGTCTGGGATAAAGGGCGAGATTTTGCCACAGTGCGCAAAGTATTGTCC | |
| | ATGCCCCAAGTCAATATTGTCAAGAAAACAGAAGTACAGACAGGCGGATTCTCCAAGGAGTCAATTTT | |
| | ACCAAAAAGAAATTCGGACAAGCTTATTGCTCGTAAAAAAGACTGGGATCCAAAAAAATATGGTGGTT | |
| | TTGATAGTCCAACGGTAGCTTATTCAGTCCTAGTGGTTGCTAAGGTGGAAAAAGGGAAATCGAAGAAG | |
| | TTAAAATCCGTTAAAGAGTTACTAGGGATCACAATTATGGAAAGAAGTTCCTTTGAAAAAAATCCGAT | |
| | TGACTTTTTAGAAGCTAAAGGATATAAGGAAGTTAAAAAAGACTTAATCATTAAACTACCTAAATATA | |
| | GTCTTTTTGAGTTAGAAAACGGTCGTAAACGGATGCTGGCTAGTGCCGGAGAATTACAAAAAGGAAAT | |
| | GAGCTGGCTCTGCCAAGCAAATATGTGAATTTTTTATATTTAGCTAGTCATTATGAAAAGTTGAAGGG | |
| | TAGTCCAGAAGATAACGAACAAAAACAATTGTTTGTGGAGCAGCATAAGCATTATTTAGATGAGATTA | |
| | TTGAGCAAATCAGTGAATTTTCTAAGCGTGTTATTTTAGCAGATGCCAATTTAGATAAAGTTCTTAGT | |
| | GCATATAACAAACATAGAGACAAACCAATACGTGAACAAGCAGAAAATATTATTCATTTATTTACGTT | |
| | GACGAATCTTGGAGCTCCCGCTGCTTTTAAATATTTTGATACAACAATTGATCGTAAACGATATACGT | |
| | CTACAAAAGAAGTTTTAGATGCCACTCTTATCCATCAATCCATCACTGGTCTTTATGAAACACGCATT | |
| | GATTTGAGTCAGCTAGGAGGTGACTGA | |
| SpCas9 | MDKKYSIGLDIGTNSVGWAVITDEYKVPSKKFKVLGNTDRHSIKKNLIGALLFDSGETAEATRLKRTA | 12 |
| Streptococcus | RRRYTRRKNRICYLQEIFSNEMAKVDDSFFHRLEESFLVEEDKKHERHPIFGNIVDEVAYHEKYPTIY | |
| pyogenes M1GAS | HLRKKLVDSTDKADLRLIYLALAHMIKFRGHFLIEGDLNPDNSDVDKLFIQLVQTYNQLFEENPINAS | |
| wild type | GVDAKAILSARLSKSRRLENLIAQLPGEKKNGLFGNLIALSLGLTPNFKSNFDLAEDAKLQLSKDTYD | |
| Encoded | DDLDNLLAQIGDQYADLFLAAKNLSDAILLSDILRVNTEITKAPLSASMIKRYDEHHQDLTLLKALVR | |
| product of | QQLPEKYKEIFFDQSKNGYAGYIDGGASQEEFYKFIKPILEKMDGTEELLVKLNREDLLRKQRTFDNG | |
| NC_002737.2 | SIPHQIHLGELHAILRRQEDFYPFLKDNREKIEKILTFRIPYYVGPLARGNSRFAWMTRKSEETITPW | |
| (100% | NFEEVVDKGASAQSFIERMTNFDKNLPNEKVLPKHSLLYEYFTVYNELTKVKYVTEGMRKPAFLSGEQ | |
| identical to | KKAIVDLLFKTNRKVTVKQLKEDYFKKIECFDSVEISGVEDRFNASLGTYHDLLKIIKDKDFLDNEEN | |
| the canonical | EDILEDIVLTLTLFEDREMIEERLKTYAHLFDDKVMKQLKRRRYTGWGRLSRKLINGIRDKQSGKTIL | |
| Q99ZW2 | DFLKSDGFANRNFMQLIHDDSLTFKEDIQKAQVSGQGDSLHEHIANLAGSPAIKKGILQTVKVVDELV | |
| wild type) | KVMGRHKPENIVIEMARENQTTQKGQKNSRERMKRIEEGIKELGSQILKEHPVENTQLQNEKLYLYYL | |
| | QNGRDMYVDQELDINRLSDYDVDHIVPQSFLKDDSIDNKVLTRSDKNRGKSDNVPSEEVVKKMKNYWR | |
| | QLLNAKLITQRKFDNLTKAERGGLSELDKAGFIKRQLVETRQITKHVAQILDSRMNTKYDENDKLIRE | |
| | VKVITLKSKLVSDFRKDFQFYKVREINNYHHAHDAYLNAVVGTALIKKYPKLESEFVYGDYKVYDVRK | |
| | MIAKSEQEIGKATAKYFFYSNIMNFFKTEITLANGEIRKRPLIETNGETGEIVWDKGRDFATVRKVLS | |
| | MPQVNIVKKTEVQTGGFSKESILPKRNSDKLIARKKDWDPKKYGGFDSPTVAYSVLVVAKVEKGKSKK | |
| | LKSVKELLGITIMERSSFEKNPIDFLEAKGYKEVKKDLIIKLPKYSLFELENGRKRMLASAGELQKGN | |
| | ELALPSKYVNFLYLASHYEKLKGSPEDNEQKQLFVEQHKHYLDEIIEQISEFSKRVILADANLDKVLS | |
| | AYNKHRDKPIREQAENIIHLFTLTNLGAPAAFKYFDTTIDRKRYTSTKEVLDATLIHQSITGLYETRI | |
| | DLSQLGGD | |
| Cas9 | DKKYSIGLAIGTNSVGWAVITDEYKVPSKKFKVLGNTDRHSIKKNLIGALLFDSGETAEATRLKRTAR | 407 |
| | RRYTRRKNRICYLQEIFSNEMAKVDDSFFHRLEESFLVEEDKKHERHPIFGNIVDEVAYHEKYPTIYH | |
| | LRKKLVDSTDKADLRLIYLALAHMIKFRGHFLIEGDLNPDNSDVDKLFIQLVQTYNQLFEENPINASG | |
| | VDAKAILSARLSKSRRLENLIAQLPGEKKNGLFGNLIALSLGLTPNFKSNFDLAEDAKLQLSKDTYDD | |
| | DLDNLLAQIGDQYADLFLAAKNLSDAILLSDILRVNTEITKAPLSASMIKRYDEHHQDLTLLKALVRQ | |
| | QLPEKYKEIFFDQSKNGYAGYIDGGASQEEFYKFIKPILEKMDGTEELLVKLNREDLLRKQRTFDNGS | |
| | IPHQIHLGELHAILRRQEDFYPFLKDNREKIEKILTFRIPYYVGPLARGNSRFAWMTRKSEETITPWN | |
| | FEEVVDKGASAQSFIERMTNFDKNLPNEKVLPKHSLLYEYFTVYNELTKVKYVTEGMRKPAFLSGEQK | |
| | KAIVDLLFKTNRKVTVKQLKEDYFKKIECFDSVEISGVEDRFNASLGTYHDLLKIIKDKDFLDNEENE | |
| | DILEDIVLTLTLFEDREMIEERLKTYAHLFDDKVMKQLKRRRYTGWGRLSRKLINGIRDKQSGKTILD | |
| | FLKSDGFANRNFMQLIHDDSLTFKEDIQKAQVSGQGDSLHEHIANLAGSPAIKKGILQTVKVVDELVK | |
| | VMGRHKPENIVIEMARENQTTQKGQKNSRERMKRIEEGIKELGSQILKEHPVENTQLQNEKLYLYYLQ | |
| | NGRDMYVDQELDINRLSDYDVDHIVPQSFLKDDSIDNKVLTRSDKNRGKSDNVPSEEVVKKMKNYWRQ | |
| | LLNAKLITQRKFDNLTKAERGGLSELDKAGFIKRQLVETRQITKHVAQILDSRMNTKYDENDKLIREV | |
| | KVITLKSKLVSDFRKDFQFYKVREINNYHHAHDAYLNAVVGTALIKKYPKLESEFVYGDYKVYDVRKM | |
| | IAKSEQEIGKATAKYFFYSNIMNFFKTEITLANGEIRKRPLIETNGETGEIVWDKGRDFATVRKVLSM | |
| | PQVNIVKKTEVQTGGFSKESILPKRNSDKLIARKKDWDPKKYGGFVSPTVAYSVLVVAKVEKGKSKKL | |
| | KSVKELLGITIMERSSFEKNPIDFLEAKGYKEVKKDLIIKLPKYSLFELENGRKRMLASARELQKGNE | |
| | LALPSKYVNFLYLASHYEKLKGSPEDNEQKQLFVEQHKHYLDEIIEQISEFSKRVILADANLDKVLSA | |
| | YNKHRDKPIREQAENIIHLFTLTNLGAPAAFKYFDTTIDRKQYRSTKEVLDATLIHQSITGLYETRID | |
| | LSQLGGD | |

Wild type Cas9 orthologs

| | | |
|---|---|---|
| LfCas 9 | MKEYHIGLDIGTSSIGWAVTDSQFKLMRIKGKTAIGVRLFEEGKTAAERRTFRTTRRRLKRRKWRLHY | 13 |
| Lactobacillus | LDEIFAPHLQEVDENFLRRLKQSNIHPEDPTKNQAFIGKLLFPDLLKKNERGYPTLIKMRDELPVEQR | |
| fermentum wild | AHYPVMNIYKLREAMINEDRQFDLREVYLAVHHIVKYRGHFLNNASVDKFKVGRIDFDKSFNVLNEAY | |
| type | EELQNGEGSFTIEPSKVEKIGQLLLDTKMRKLDRQKAVAKLLEVKVADKEETKRNKQIATAMSKLVLG | |
| GenBank: | YKADFATVAMANGNEWKIDLSSETSEDEIEKFREELSDAQNDILTEITSLFSQIMLNEIVPNGMSISE | |
| SNX31424.11 | SMMDRYWTHERQLAEVKEYLATQPASARKEFDQVYNKYIGQAPKERGFDLEKGLKKILSKKENWKEID | |
| | ELLKAGDFLPKQRTSANGVIPHQMHQQELDRIIEKQAKYYPWLATENPATGERDRHQAKYELDQLVSF | |
| | RIPYYVGPLVTPEVQKATSGAKFAWAKRKEDGEITPWNLWDKIDRAESAEAFIKRMTVKDTYLLNEDV | |
| | LPANSLLYQKYNVLNELNNVRVNGRRLSVGIKQDIYTELFKKKKTVKASDVASLVMAKTRGVNKPSVE | |
| | GLSDPKKFNSNLATYLDLKSIVGDKVDDNRYQTDLENIIEWRSVFEDGEIFADKLTEVEWLTDEQRSA | |
| | LVKKRYKGWGRLSKKLLTGIVDENGQRIIDLMWNTDQNFKEIVDQPVFKEQIDQLNQKAITNDGMTLR | |
| | ERVESVLDDAYTSPQNKKAIWQVVRVVEDIVKAVGNAPKSISIEFARNEGNKGEITRSRRTQLQKLFE | |
| | DQAHELVKDTSLTEELEKAPDLSDRYYFYFTQGGKDMYTGDPINFDEISTKYDIDHILPQSFVKDNSL | |
| | DNRVLTSRKENNKKSDQVPAKLYAAKMKPYWNQLLKQGLITQRKFENLTKDVDQNIKYRSLGFVKRQL | |
| | VETRQVIKLTANILGSMYQEAGTEIIETRAGLTKQLREEFDLPKVREVNDYHHAVDAYLTTFAGQYLN | |
| | RRYPKLRSFFVYGEYMKFKHGSDLKLRNFNFFHELMEGDKSQGKWDQQTGELITTRDEVAKSFDRLL | |
| | NMKYMLVSKEVHDRSDQLYGATIVTAKESGKLTSPIEIKKNRLVDLYGAYTNGTSAFMTIIKFTGNKP | |
| | KYKVIGIPTTSAASLKRAGKPGSESYNQELHRIIKSNPKVKKGFEIVVPHVSYGQLIVDGDCKFTLAS | |
| | PTVQHPATQLVLSKKSLETISSGYKILKDKPAIANERLIRVFDEWGQMNRYFTIFDQRSNRQKVADA | |
| | RDKFLSLPTESKYEGAKKVQVGKTEVITNLLMGLHANATQGDLKVLGLATFGFFQSTTGLSLSEDTMI | |
| | VYQSPTGLFERRICLKDI | |
| SaCas9 | MDKKYSIGLDIGTNSVGWAVITDEYKVPSKKFKVLGNTDRHSIKKNLIGALLFDSGETAEATRLKRTA | 14 |
| Staphylococcus | RRRYTRRKNRICYLQEIFSNEMAKVDDSFFHRLEESFLVEEDKKHERHPIFGNIVDEVAYHEKYPTIY | |
| aureus wild | HLRKKLVDSTDKADLRLIYLALAHMIKFRGHFLIEGDLNPDNSDVDKLFIQLVQTYNQLFEENPINAS | |
| type | GVDAKAILSARLSKSRRLENLIAQLPGEKKNGLFGNLIALSLGLTPNFKSNFDLAEDAKLQLSKDTYD | |
| GenBank: | DDLDNLLAQIGDQYADLFLAAKNLSDAILLSDILRVNTEITKAPLSASMIKRYDEHHQDLTLLKALVR | |
| AYD60528.1 | QQLPEKYKEIFFDQSKNGYAGYIDGGASQEEFYKFIKPILEKMDGTEELLVKLNREDLLRKQRTFDNG | |
| | SIPHQIHLGELHAILRRQEDFYPFLKDNREKIEKILTFRIPYYVGPLARGNSRFAWMTRKSEETITPW | |
| | NFEEVVDKGASAQSFIERMTNFDKNLPNEKVLPKHSLLYEYFTVYNELTKVKYVTEGMRKPAFLSGEQ | |
| | KKAIVDLLFKTNRKVTVKQLKEDYFKKIECFDSVEISGVEDRFNASLGTYHDLLKIIKDKDFLDNEEN | |
| | EDILEDIVLTLTLFEDREMIEERLKTYAHLFDDKVMKQLKRRRYTGWGRLSRKLINGIRDKQSGKTIL | |
| | DFLKSDGFANRNFMQLIHDDSLTFKEDIQKAQVSGQGDSLHEHIANLAGSPAIKKGILQTVKVVDELV | |
| | KVMGRHKPENIVIEMARENQTTQKGQKNSRERMKRIEEGIKELGSQILKEHPVENTQLQNEKLYLYYL | |
| | QNGRDMYVDQELDINRLSDYDVDHIVPQSFLKDDSIDNKVLTRSDKNRGKSDNVPSEEVVKKMKNYWR | |
| | QLLNAKLITQRKFDNLTKAERGGLSELDKAGFIKRQLVETRQITKHVAQILDSRMNTKYDENDKLIRE | |
| | VKVITLKSKLVSDFRKDFQFYKVREINNYHHAHDAYLNAVVGTALIKKYPKLESEFVYGDYKVYDVRK | |
| | MIAKSEQEIGKATAKYFFYSNIMNFFKTEITLANGEIRKRPLIETNGETGEIVWDKGRDFATVRKVLS | |
| | MPQVNIVKKTEVQTGGFSKESILPKRNSDKLIARKKDWDPKKYGGFDSPTVAYSVLVVAKVEKGKSKK | |
| | LKSVKELLGITIMERSSFEKNPIDFLEAKGYKEVKKDLIIKLPKYSLFELENGRKRMLASAGELQKGN | |
| | ELALPSKYVNFLYLASHYEKLKGSPEDNEQKQLFVEQHKHYLDEIIEQISEFSKRVILADANLDKVLS | |
| | AYNKHRDKPIREQAENIIHLFTLTNLGAPAAFKYFDTTIDRKRYTSTKEVLDATLIHQSITGLYETRI | |
| | DLSQLGGD | |
| SaCas9 | MGKRNYILGLDIGITSVGYGIIDYETRDVIDAGVRLFKEANVENNEGRRSKRGARRLKRRRRHRIQRV | 15 |
| Staphylococcus | KKLLFDYNLLTDHSELSGINPYEARVKGLSQKLSEEEFSAALLHLAKRRGVHNVNEVEEDTGNELSTK | |
| aureus | EQISRNSKALEEKYVAELQLERLKKDGEVRGSINRFKTSDYVKEAKQLLKVQKAYHQLDQSFIDTYID | |
| | LLETRRTYYEGPGEGSPFGWKDIKEWYEMLMGHCTYFPEELRSVKYAYNADLYNALNDLNNLVITRDE | |
| | NEKLEYYEKFQIIENVFKQKKKPTLKQIAKEILVNEEDIKGYRVTSTGKPEFTNLKVYHDIKDITARK | |
| | EIIENAELLDQIAKILTIYQSSEDIQEELTNLNSELTQEEIEQISNLKGYTGTHNLSLKAINLILDEL | |
| | WHTNDNQIAIFNRLKLVPKKVDLSQQKEIPTTLVDDFILSPVVKRSFIQSIKVINAIIKKYGLPNDII | |
| | IELAREKNSKDAQKMINEMQKRNRQTNERIEEIIRTTGKENAKYLIEKIKLHDMQEGKCLYSLEAIPL | |
| | EDLLNNPFNYEVDHIIPRSVSFDNSFNNKVLVKQEENSKKGNRTPFQYLSSSDSKISYETFKKHILNL | |
| | AKGKGRISKTKKEYLLEERDINRFSVQKDFINRNLVDTRYATRGLMNLLRSYFRVNNLDVKVKSINGG | |
| | FTSFLRRKWKFKKERNKGYKHHAEDALIIANADFIFKEWKKLDKAKKVMENQMFEEKQAESMPEIETE | |
| | QEYKEIFITPHQIKHIKDFKDYKYSHRVDKKPNRKLINDTLYSTRKDDKGNTLIVNNLNGLYDKDNDK | |
| | LKKLINKSPEKLLMYHHDPQTYQKLKLIMEQYGDEKNPLYKYYEETGNYLTKYSKKDNGPVIKKIKYY | |
| | GNKLNAHLDITDDYPNSRNKVVKLSLKPYRFDVYLDNGVYKFVTVKNLDVIKKENYYEVNSKCYEEAK | |
| | KLKKISNQAEFIASFYKNDLIKINGELYRVIGVNNDLLNRIEVNMIDITYREYLENMNDKRPPHIIKT | |
| | IASKTQSIKKYSTDILGNLYEVKSKKHPQIIKK | |
| StCas9 | MLFNKCIIISINLDFSNKEKCMTKPYSIGLDIGTNSVGWAVITDNYKVPSKKMKVLGNTSKKYIKKNL | 16 |
| Streptococcus | LGVLLFDSGITAEGRRLKRTARRRYTRRRNRILYLQEIFSTEMATLDDAFFQRLDDSFLVPDDKRDSK | |
| thermophilus | YPIFGNLVEEKVYHDEFPTIYHLRKYLADSTKKADLRLVYLALAHMIKYRGHFLIEGEFNSKNNDIQK | |
| UniProtKB/ | NFQDFLDTYNAIFESDLSLENSKQLEEIVKDKISKLEKKDRILKLFPGEKNSGIFSEFLKLIVGNQAD | |
| Swiss-Prot: | FRKCFNLDEKASLHFSKESYDEDLETLLGYIGDDYSDVFLKAKKLYDAILLSGFLTVTDNETEAPLSS | |
| G3ECR1.2 | AMIKRYNEHKEDLALLKEYIRNISLKTYNEVFKDDTKNGYAGYIDGKTNQEDFYVYLKNLLAEFEGAD | |
| Wild type | YFLEKIDREDFLRKQRTFDNGSIPYQIHLQEMRAILDKQAKFYPFLAKNKERIEKILTFRIPYYVGPL | |
| | ARGNSDFAWSIRKRNEKITPWNFEDVIDKESSAEAFINRMTSFDLYLPEEKVLPKHSLLYETFNVYNE | |
| | LTKVRFIAESMRDYQFLDSKQKKDIVRLYFKDKRKVTDKDIIEYLHAIYGYDGIELKGIEKQFNSSLS | |
| | TYHDLLNIINDKEFLDDSSNEAIIEEIIHTLTIFEDREMIKQRLSKFENIFDKSVLKKLSRRHYTGWG | |
| | KLSAKLINGIRDEKSGNTILDYLIDDGISNRNFMQLIHDDALSFKKKIQKAQIIGDEDKGNIKEVVKS | |
| | LPGSPAIKKGILQSIKIVDELVKVMGGRKPESIVVEMARENQYTNQGKSNSQQRLKRLEKSLKELGSK | |
| | ILKENIPAKLSKIDNNALQNDRLYLYYLQNGKDMYTGDDLDIDRLSNYDIDHIIPQAFLKDNSIDNKV | |
| | LVSSASNRGKSDDFPSLEVVKKRKTFWYQLLKSKLISQRKFDNLTKAERGGLLPEDKAGFIQRQLVET | |
| | RQITKHVARLLDEKFNNKKDENNRAVRTVKIITLKSTLVSQFRKDFELYKVREINDFHHAHDAYLNAV | |
| | IASALLKKYPKLEPEFVYGDYPKYNSFRERKSATEKVYFYSNIMNIFKKSISLADGRVIERPLIEVNE | |
| | ETGESVWNKESDLATVRRVLSYPQVNVVKKVEEQNHGLDRGKPKGLFNANLSSKPKPNSNENLVGAKE | |
| | YLDPKKYGGYAGISNSFAVLVKGTIEKGAKKKITNVLEFQGISILDRINYRKDKLNFLLEKGYKDIEL | |
| | IIELPKYSLFELSDGSRRMLASILSTNNKRGEIHKGNQIFLSQKFVKLLYHAKRISNTINENHRKYVE | |
| | NHKKEFEELFYYILEFNENYVGAKKNGKLLNSAFQSWQNHSIDELCSSFIGPTGSERKGLFELTSRGS | |
| | AADFEFLGVKIPRYRDYTPSSLLKDATLIHQSVTGLYETRIDLAKLGEG | |
| LcCas9 | MKIKNYNLALTPSTSAVGHVEVDDDLNILEPVHHQKAIGVAKFGEGETAEARRLARSARRTTKRRANR | 17 |
| Lactobacillus | INHYFNEIMKPEIDKVDPLMFDRIKQAGLSPLDERKEFRTVIFDRPNIASYYHNQFPTIWHLQKYLMI | |
| crispatus | TDEKADIRLIYWALHSLLKHRGHFFNTTPMSQFKPGKLNLKDDMLALDDYNDLEGLSFAVANSPEIEK | |
| NCBI Reference | VIKDRSMHKKEKIAELKKLIVNDVPDKDLAKRNNKIITQIVNAIMGNSFHLNFIFDMDLDKLTSKAWS | |
| Sequence: | FKLDDPELDTKFDAISGSMTDNQIGIFETLQKIYSAISLLDILNGSSNVVDAKNALYDKHKRDLNLYF | |
| WP_133478044.1 | KFLNTLPDEIAKTLKAGYTLYIGNRKKDLLAARKLLKVNVAKNFSQDDFYKLINKELKSIDKQGLQTR | |
| Wild type | FSEKVGELVAQNNFLPVQRSSDNVFIPYQLNAITFNKILENQGKYYDFLVKPNPAKKDRKNAPYELSQ | |
| | LMQFTIPYYVGPLVTPEEQVKSGIPKTSRFAWMVRKDNGAITPWNFYDKVDIEATADKFIKRSIAKDS | |
| | YLLSELVLPKHSLLYEKYEVFNELSNVSLDGKKLSGGVKQILFNEVFKKTNKVNTSRILKALAKHNIP | |
| | GSKITGLSNPEEFTSSLQTYNAWKKYFPNQIDNFAYQQDLEKMIEWSTVFEDHKILAKKLDEIEWLDD | |
| | DQKKFVANTRLRGWGRLSKRLLTGLKDNYGKSIMQRLETTKANFQQIVYKPEFREQIDKISQAAAKNQ | |
| | SLEDILANSYTSPSNRKAIRKTMSVVDEYIKLNHGKEPDKIFLMFQRSEQEKGKQTEARSKQLNRILS | |
| | QLKADKSANKLFSKQLADEFSNAIKKSKYKLNDKQYFYFQQLGRDALTGEVIDYDELYKYTVLHIIPR | |
| | SKLTDDSQNNKVLTKYKIVDGSVALKFGNSYSDALGMPIKAFWTELNRLKLIPKGKLLNLTTDFSTLN | |
| | KYQRDGYIARQLVETQQIVKLLATIMQSRFKHTKIIEVRNSQVANIRYQFDYFRIKNLNEYYRGFDAY | |
| | LAAVVGTYLYKVYPKARRLFVYGQYLKPKKTNQENQDMHLDSEKKSQGFNFLWNLLYGKQDQIFVNGT | |
| | DVIAFNRKDLITKMNTVYNYKSQKISLAIDYHNGAMFKATLFPRNDRDTAKTRKLIPKKKDYDTDIYG | |
| | GYTSNVDGYMLLAEIIKRDGNKQYGFYGVPSRLVSELDTLKKTRYTEYEEKLKEIIKPELGVDLKKIK | |
| | KIKILKNKVPFNQVIIDKGSKFFITSTSYRWNYRQLILSAESQQTLMDLVVDPDFSNHKARKDARKNA | |
| | DERLIKVYEEILYQVKNYMPMFVELHRCYEKLVDAQKTFKSLKISDKAMVLNQILILLHSNATSPVLE | |
| | KLGYHTRFTLGKKHNLISENAVLVTQSITGLKENHVSIKQML | |
| PdCas9 | MTNEKYSIGLDIGTSSIGFAVVNDNNRVIRVKGKNAIGVRLFDEGKAAADRRSFRTTRRSFRTTRRRL | 18 |
| Pedicoccus | SRRRWRLKLLREIFDAYITPVDEAFFIRLKESNLSPKDSKKQYSGDILFNDRSDKDFYEKYPTIYHLR | |
| damnosus | NALMTEHRKFDVREIYLAIHHIMKFRGHFLNATPANNFKVGRLNLEEKFEELNDIYQRVFPDESIEFR | |
| NCBI Reference | TDNLEQIKEVLLDNKRSRADRQRTLVSDIYQSSEDKDIEKRNKAVATEILKASLGNKAKLNVITNVEV | |
| Sequence: | DKEAAKEWSITFDSESIDDDLAKIEGQMTDDGHEIIEVLRSLYSGITLSAIVPENHTLSQSMVAKYDL | |
| WP_062913273.1 | HKDHLKLFKKLINGMTDTKKAKNLRAAYDGYIDGVKGKVLPQEDFYKQVQVNLDDSAEANEIQTYIDQ | |
| Wild type | DIFMPKQRTKANGSIPHQLQQQELDQIIENQKAYYPWLAELNPNPDKKRQQLAKYKLDELVTFRVPYY | |
| | VGPMITAKDQKNQSGAEFAWMIRKEPGNITPWNFDQKVDRMATANQFIKRMTTTDTYLLGEDVLPAQS | |
| | LLYQKFEVLNELNKIRIDHKPISIEQKQQIFNDLFKQFKNVTIKHLQDYLVSQGQYSKRPLIEGLADE | |
| | KRFNSSLSTYSDLCGIFGAKLVEENDRQEDLEKIIEWSTIFEDKKIYRAKLNDLTWLTDDQKEKLATK | |
| | RYQGWGRLSRKLLVGLKNSEHRNIMDILWITNENFMQIQAEPDFAKLVTDANKGMLEKTDSQDVINDL | |
| | YTSPQNKKAIRQILLVVHDIQNAMHGQAPAKIHVEFARGEERNPRRSVQRQRQVEAAYEKVSNELVSA | |
| | KVRQEFKEAINNKRDFKDRLFLYFMQGGIDIYTGKQLNIDQLSSYQIDHILPQAFVKDDSLTNRVLTN | |
| | ENQVKADSVPIDIFGKKMLSVWGRMKDQGLISKGKYRNLTMNPENISAHTENGFINRQLVETRQVIKL | |
| | AVNILADEYGDSTQIISVKADLSHQMREDFELLKNRDVNDYHHAFDAYLAAFIGNYLLKRYPKLESYF | |
| | VYGDFKKFTQKETKMRRFNFIYDLKHCDQVVNKETGEILWTKDEDIKYIRHLFAYKKILVSHEVREKR | |
| | GALYNQTIYKAKDDKGSGQESKKLIRIKDDKETKIYGGYSGKSLAYMTIVQITKKNKVSYRVIGIPTL | |
| | ALARLNKLENDSTENNGELYKIIKPQFTHYKVDKKNGEIIETTDDFKIVVSKVRFQQLIDDAGQFFML | |
| | ASDTYKNNAQQLVISNNALKAINNTNITDCPRDDLERLDNLRLDSAFDEIVKKMDKYFSAYDANNFRE | |
| | KIRNSNLIFYQLPVEDQWENNKITELGKRTVLTRILQGLHANATTTDMSIFKIKTPFGQLRQRSGISL | |
| | SENAQLIYQSPTGLFERRVQLNKIK | |
| FnCas9 | MKKQKFSDYYLGFDIGTNSVGWCVTDLDYNVLRFNKKDMWGSRLFEEAKTAAERRVQRNSRRRLKRRK | 19 |
| Fusobaterium | WRLNLLEEIFSNEILKIDSNFFRRLKESSLWLEDKSSKEKFTLFNDDNYKDYDFYKQYPTIFHLRNEL | |
| nucleatum | IKNPEKKDIRLVYLAIHSIFKSRGHFLFEGQNLKEIKNFETLYNNLIAFLEDNGINKIIDKNNIEKLE | |
| NCBI Reference | KIVCDSKKGLKDKEKEFKEIFNSDKQLVAIFKLSVGSSVSLNDLFDTDEYKKGEVEKEKISFREQIYE | |
| Sequence: | DDKPIYYSILGEKIELLDIAKTFYDFMVLNNILADSQYISEAKVKLYEEHKKDLKNLKYIIRKYNKGN | |
| WP_060798984.1 | YDKLFKDKNENNYSAYIGLNKEKSKKEVIEKSRLKIDDLIKNIKGYLPKVEEIEEKDKAIFNKILNKI | |
| | ELKTILPKQRISDNGTLPYQIHEAELEKILENQSKYYDFLNYEENGIITKDKLLMTFKFRIPYYVGPL | |
| | NSYHKDKGGNSWIVRKEEGKILPWNFEQKVDIEKSAEEFIKRMTNKCTYLNGEDVIPKDTFLYSEYVI | |
| | LNELNKVQVNDEFLNEENKRKIIDELFKENKKVSEKKFKEYLLVKQIVDGTIELKGVKDSFNSNYISY | |
| | IRFKDIFGEKLNLDIYKEISEKSILWKCLYGDDKKIFEKKIKNEYGDILTKDEIKKINTFKFNNWGRL | |
| | SEKLLTGIEFINLETGECYSSVMDALRRTNYNLMELLSSKFTLQESINNENKEMNEASYRDLIEESYV | |
| | SPSLKRAIFQTLKIYEEIRKITGRVPKKVFIEMARGGDESMKNKKIPARQEQLKKLYDSCGNDIANFS | |
| | IDIKEMKNSLISYDNNSLRQKKLYLYYLQFGKCMYTGREIDLDRLLQNNDTYDIDHIYPRSKVIKDDS | |
| | FDNLVLVLKNENAEKSNEYPVKKEIQEKMKSFWRFLKEKNFISDEKYKRLTGKDDFELRGFMARQLVN | |
| | VRQTTKEVGKILQQIEPEIKIVYSKAEIASSFREMFDFIKVRELNDTHHAKDAYLNIVAGNVYNTKFT | |
| | EKPYRYLQEIKENYDVKKIYNYDIKNAWDKENSLEIVKKNMEKNTVNITRFIKEKKGQLFDLNPIKKG | |
| | ETSNEIISIKPKVYNGKDDKLNEKYGYYKSLNPAYFLYVEHKEKNKRIKSFERVNLVDVNNIKDEKSL | |
| | VKYLIENKKLVEPRVIKKVYKRQVILINDYPYSIVTLDSNKLMDFENLKPLFLENKYEKILKNVIKFL | |
| | EDNQGKSEENYKFIYLKKKDRYEKNETLESVKDRYNLEFNEMYDKFLEKLDSKDYKNYMNNKKYQELL | |
| | DVKEKFIKLNLFDKAFTLKSFLDLFNRKTMADFSKVGLTKYLGKIQKISSNVLSKNELYLLEESVTGL | |
| | FVKKIKL | |
| EcCas9 | MNKYYLGLDMGSASVGWAVTDENYHLVRRKGKDLWGVRTFDVAQTAKERRITRGNRRRQDRRKQRIQI | 20 |
| Enterococcus | LQELLGEEVLKTDPGFFHRMKESRYVVEDKRTLDGKQVELPYALFVDKDYTDKEYYKQFPTINHLIVY | |
| cecorum | LMTTSDTPDIRLVYLALHYYMKNRGNFLHSGDINNVKDINDILEQLDNVLETFLDGWNLKLKSYVEDI | |
| NCBI Reference | KNIYNRDLGRGERKKAFVNTLGAKTKAEKAFCSLISGGSTNLAELFDDSSLKEIETPKIEFASSSLED | |
| Sequence: | KIDGIQEALEDRFAVIEAAKRLYDWKTLTDILGDSSSLAEARVNSYQMHHEQLLELKSLVKEYLDRKV | |
| WP_047338501.1 | FQEVFVSLNVANNYPAYIGHTKINGKKKELEVKRTKRNDFYSYVKKQVIEPIKKKVSDEAVLTKLSEI | |
| Wild type | ESLIEVDKYLPLQVNSDNGVIPYQVKLNELTRIFDNLENRIPVLRENRDKIIKTFKFRIPYYVGSLNG | |
| | VVKNGKCTNWMVRKEEGKIYPWNFEDKVDLEASAEQFIRRMTNKCTYLVNEDVLPKYSLLYSKYLVLS | |
| | ELNNLRIDGRPLDVKIKQDIYENVFKKNRKVTLKKIKKYLLKEGIITDDDELSGLADDVKSSLTAYRD | |
| | FKEKLGHLDLSEAQMENIILNITLFGDDKKLLKKRLAALYPFIDDKSLNRIATLNYRDWGRLSERFLS | |
| | GITSVDQETGELRTIIQCMYETQANLMQLLAEPYHFVEAIEKENPKVDLESISYRIVNDLYVSPAVKR | |
| | QIWQTLLVIKDIKQVMKHDPERIFIEMAREKQESKKTKSRKQVLSEVYKKAKEYEHLFEKLNSLTEEQ | |
| | LRSKKIYLYFTQLGKCMYSGEPIDFENLVSANSNYDIDHIYPQSKTIDDSFNNIVLVKKSLNAYKSNH | |
| | YPIDKNIRDNEKVKTLWNTLVSKGLITKEKYERLIRSTPFSDEELAGFIARQLVETRQSTKAVAEILS | |
| | NWFPESEIVYSKAKNVSNFRQDFEILKVRELNDCHHAHDAYLNIVVGNAYHTKFTNSPYRFIKNKANQ | |
| | EYNLRKLLQKVNKIESNGVVAWVGQSENNPGTIATVKKVIRRNTVLISRMVKEVDGQLFDLTLMKKGK | |
| | GQVPIKSSDERLTDISKYGGYNKATGAYFTFVKSKKRGKVVRSFEYVPLHLSKQFENNNELLKEYIEK | |
| | DRGLTDVEILIPKVLINSLFRYNGSLVRITGRGDTRLLLVHEQPLYVSNSFVQQLKSVSSYKLKKSEN | |
| | DNAKLTKTATEKLSNIDELYDGLLRKLDLPIYSYWFSSIKEYLVESRTKYIKLSIEEKALVIFEILHL | |
| | FQSDAQVPNLKILGLSTKPSRIRIQKNLKDTDKMSIIHQSPSGIFEHEIELTSL | |
| AhCas 9 | MQNGFLGITVSSEQVGWAVTNPKYELERASRKDLWGVRLFDKAETAEDRRMFRTNRRLNQRKKNRIHY | 21 |
| Anaerostipes | LRDIFHEEVNQKDPNFFQQLDESNFCEDDRTVEFNFDTNLYKNQFPTVYHLRKYLMETKDKPDIRLVY | |
| hadrus | LAFSKFMKNRGHFLYKGNLGEVMDFENSMKGFCESLEKFNIDFPTLSDEQVKEVRDILCDHKIAKTVK | |
| NCBI Reference | KKNIITITKVKSKTAKAWIGLFCGCSVPVKVLFQDIDEEIVTDPEKISFEDASYDDYIANIEKGVGIY | |
| Sequence: | YEAIVSAKMLFDWSILNEILGDHQLLSDAMIAEYNKHHDDLKRLQKIIKGTGSRELYQDIFINDVSGN | |
| WP_044924278.1 | YVCYVGHAKTMSSADQKQFYTFLKNRLKNVNGISSEDAEWIDTEIKNGTLLPKQTKRDNSVIPHQLQL | |
| Wild type | REFELILDNMQEMYPFLKENREKLLKIFNFVIPYYVGPLKGVVRKGESTNWMVPKKDGVIHPWNFDEM | |
| | VDKEASAECFISRMTGNCSYLFNEKVLPKNSLLYETFEVLNELNPLKINGEPISVELKQRIYEQLFLT | |
| | GKKVTKKSLTKYLIKNGYDKDIELSGIDNEFHSNLKSHIDFEDYDNLSDEEVEQIILRITVFEDKQLL | |
| | KDYLNREFVKLSEDERKQICSLSYKGWGNLSEMLLNGITVTDSNGVEVSVMDMLWNTNLNLMQILSKK | |
| | YGYKAEIEHYNKEHEKTIYNREDLMDYLNIPPAQRRKVNQLITIVKSLKKTYGVPNKIFFKISREHQD | |
| | DPKRTSSRKEQLKYLYKSLKSEDEKHLMKELDELNDHELSNDKVYLYFLQKGRCIYSGKKLNLSRLRK | |
| | SNYQNDIDYIYPLSAVNDRSMNNKVLTGIQENRADKYTYFPVDSEIQKKMKGFWMELVLQGFMTKEKY | |
| | FRLSRENDFSKSELVSFIEREISDNQQSGRMIASVLQYYFPESKIVFVKEKLISSFKRDFHLISSYGH | |
| | NHLQAAKDAYITIVVGNVYHTKFTMDPAIYFKNHKRKDYDLNRLFLENISRDGQIAWESGPYGSIQTV | |
| | RKEYAQNHIAVTKRVVEVKGGLFKQMPLKKGHGEYPLKTNDPRFGNIAQYGGYTNVTGSYFVLVESME | |
| | KGKKRISLEYVPVYLHERLEDDPGHKLLKEYLVDHRKLNHPKILLAKVRKNSLLKIDGFYYRLNGRSG | |
| | NALILTNAVELIMDDWQTKTANKISGYMKRRAIDKKARVYQNEFHIQELEQLYDFYLDKLKNGVYKNR | |
| | KNNQAELIHNEKEQFMELKTEDQCVLLTEIKKLFVCSPMQADLTLIGGSKHTGMIAMSSNVTKADFAV | |
| | IAEDPLGLRNKVIYSHKGEK | |
| KvCas9 | MSQNNNKIYNIGLDIGDASVGWAVVDEHYNLLKRHGKHMWGSRLFTQANTAVERRSSRSTRRRYNKRR | 22 |
| Kandleria | ERIRLLREIMEDMVLDVDPTFFIRLANVSFLDQEDKKDYLKENYHSNYNLFIDKDFNDKTYYDKYPTI | |
| vitulina | YHLRKHLCESKEKEDPRLIYLALHHIVKYRGNFLYEGQKFSMDVSNIEDKMIDVLRQFNEINLFEYVE | |
| NCBI Reference | DRKKIDEVLNVLKEPLSKKHKAEKAFALFDTTKDNKAAYKELCAALAGNKFNVTKMLKEAELHDEDEK | |
| Sequence: | DISFKFSDATFDDAFVEKQPLLGDCVEFIDLLHDIYSWVELQNILGSAHTSEPSISAAMIQRYEDHKN | |
| WP_031589969.1 | DLKLLKDVIRKYLPKKYFEVFRDEKSKKNNYCNYINHPSKTPVDEFYKYIKKLIEKIDDPDVKTILNK | |
| Wild type | IELESFMLKQNSRTNGAVPYQMQLDELNKILENQSVYYSDLKDNEDKIRSILTFRIPYYFGPLNITKD | |
| | RQFDWIIKKEGKENERILPWNANEIVDVDKTADEFIKRMRNFCTYFPDEPVMAKNSLTVSKYEVLNEI | |
| | NKLRINDHLIKRDMKDKMLHTLFMDHKSISANAMKKWLVKNQYFSNTDDIKIEGFQKENACSTSLTPW | |
| | IDFTKIFGKINESNYDFIEKIIYDVTVFEDKKILRRRLKKEYDLDEEKIKKILKLKYSGWSRLSKKLL | |
| | SGIKTKYKDSTRTPETVLEVMERTNMNLMQVINDEKLGFKKTIDDANSTSVSGKFSYAEVQELAGSPA | |
| | IKRGIWQALLIVDEIKKIMKHEPAHVYIEFARNEDEKERKDSFVNQMLKLYKDYDFEDETEKEANKHL | |
| | KGEDAKSKIRSERLKLYYTQMGKCMYTGKSLDIDRLDTYQVDHIVPQSLLKDDSIDNKVLVLSSENQR | |
| | KLDDLVIPSSIRNKMYGFWEKLFNNKIISPKKFYSLIKTEFNEKDQERFINRQIVETRQITKHVAQII | |
| | DNHYENTKVVTVRADLSHQFRERYHIYKNRDINDFHHAHDAYIATILGTYIGHRFESLDAKYIYGEYK | |
| | RIFRNQKNKGKEMKKNNDGFILNSMRNIYADKDTGEIVWDPNYIDRIKKCFYYKDCFVTKKLEENNGT | |
| | FFNVTVLPNDTNSDKDNTLATVPVNKYRSNVNKYGGFSGVNSFIVAIKGKKKKGKKVIEVNKLTGIPL | |
| | MYKNADEEIKINYLKQAEDLEEVQIGKEILKNQLIEKDGGLYYIVAPTEIINAKQLILNESQTKLVCE | |
| | IYKAMKYKNYDNLDSEKIIDLYRLLINKMELYYPEYRKQLVKKFEDRYEQLKVISIEEKCNIIKQILA | |
| | TLHCNSSIGKIMYSDFKISTTIGRLNGRTISLDDISFIAESPTGMYSKKYKL | |
| EfCas9 | MRLFEEGHTAEDRRLKRTARRRISRRRNRLRYLQAFFEEAMTDLDENFFARLQESFLVPEDKKWHRHP | 23 |
| Enterococcus | IFAKLEDEVAYHETYPTIYHLRKKLADSSEQADLRLIYLALAHIVKYRGHFLIEGKLSTENTSVKDQF | |
| faecalis | QQFMVIYNQTFVNGESRLVSAPLPESVLIEEELTEKASRTKKSEKVLQQFPQEKANGLFGQFLKLMVG | |
| NCBI Reference | NKADFKKVFGLEEEAKITYASESYEEDLEGILAKVGDEYSDVFLAAKNVYDAVELSTILADSDKKSHA | |
| Sequence: | KLSSSMIVRFTEHQEDLKKFKRFIRENCPDEYDNLFKNEQKDGYAGYIAHAGKVSQLKFYQYVKKIIQ | |
| WP_016631044.1 | DIAGAEYFLEKIAQENFLRKQRTFDNGVIPHQIHLAELQAIIHRQAAYYPFLKENQEKIEQLVTFRIP | |
| Wild type | YYVGPLSKGDASTFAWLKRQSEEPIRPWNLQETVDLDQSATAFIERMTNFDTYLPSEKVLPKHSLLYE | |
| | KFMVFNELTKISYTDDRGIKANFSGKEKEKIFDYLFKTRRKVKKKDIIQFYRNEYNTEIVTLSGLEED | |
| | QFNASFSTYQDLLKCGLTRAELDHPDNAEKLEDIIKILTIFEDRQRIRTQLSTFKGQFSAEVLKKLER | |
| | KHYTGWGRLSKKLINGIYDKESGKTILDYLVKDDGVSKHYNRNFMQLINDSQLSFKNAIQKAQSSEHE | |
| | ETLSETVNELAGSPAIKKGIYQSLKIVDELVAIMGYAPKRIVVEMARENQTTSTGKRRSIQRLKIVEK | |
| | AMAEIGSNLLKEQPTTNEQLRDTRLFLYYMQNGKDMYTGDELSLHRLSHYDIDHIIPQSFMKDDSLDN | |
| | LVLVGSTENRGKSDDVPSKEVVKDMKAYWEKLYAAGLISQRKFQRLTKGEQGGLTLEDKAHFIQRQLV | |
| | ETRQITKNVAGILDQRYNAKSKEKKVQIITLKASLTSQFRSIFGLYKVREVNDYHHGQDAYLNCVVAT | |
| | TLLKVYPNLAPEFVYGEYPKFQTFKENKATAKAIIYTNLLRFFTEDEPRFTKDGEILWSNSYLKTIKK | |
| | ELNYHQMNIVKKVEVQKGGFSKESIKPKGPSNKLIPVKNGLDPQKYGGFDSPVVAYTVLFTHEKGKKP | |
| | LIKQEILGITIMEKTRFEQNPILFLEEKGFLRPRVLMKLPKYTLYEFPEGRRRLLASAKEAQKGNQMV | |
| | LPEHLLTLLYHAKQCLLPNQSESLAYVEQHQPEFQEILERVVDFAEVHTLAKSKVQQIVKLFEANQTA | |
| | DVKEIAASFIQLMQFNAMGAPSTFKFFQKDIERARYTSIKEIFDATIIYQSPTGLYETRRKVVD | |
| Staphylococcus | KRNYILGLDIGITSVGYGIIDYETRDVIDAGVRLFKEANVENNEGRRSKRGARRLKRRRRHRIQRVKK | 24 |
| aureus Cas9 | LLFDYNLLTDHSELSGINPYEARVKGLSQKLSEEEFSAALLHLAKRRGVHNVNEVEEDTGNELSTKEQ | |
| | ISRNSKALEEKYVAELQLERLKKDGEVRGSINRFKTSDYVKEAKQLLKVQKAYHQLDQSFIDTYIDLL | |
| | ETRRTYYEGPGEGSPFGWKDIKEWYEMLMGHCTYFPEELRSVKYAYNADLYNALNDLNNLVITRDENE | |
| | KLEYYEKFQIIENVFKQKKKPTLKQIAKEILVNEEDIKGYRVTSTGKPEFTNLKVYHDIKDITARKEI | |
| | IENAELLDQIAKILTIYQSSEDIQEELTNLNSELTQEEIEQISNLKGYTGTHNLSLKAINLILDELWH | |
| | TNDNQIAIFNRLKLVPKKVDLSQQKEIPTTLVDDFILSPVVKRSFIQSIKVINAIIKKYGLPNDIIIE | |
| | LAREKNSKDAQKMINEMQKRNRQTNERIEEIIRTTGKENAKYLIEKIKLHDMQEGKCLYSLEAIPLED | |
| | LLNNPFNYEVDHIIPRSVSFDNSFNNKVLVKQEENSKKGNRTPFQYLSSSDSKISYETFKKHILNLAK | |
| | GKGRISKTKKEYLLEERDINRFSVQKDFINRNLVDTRYATRGLMNLLRSYFRVNNLDVKVKSINGGFT | |
| | SFLRRKWKFKKERNKGYKHHAEDALIIANADFIFKEWKKLDKAKKVMENQMFEEKQAESMPEIETEQE | |
| | YKEIFITPHQIKHIKDFKDYKYSHRVDKKPNRELINDTLYSTRKDDKGNTLIVNNLNGLYDKDNDKLK | |
| | KLINKSPEKLLMYHHDPQTYQKLKLIMEQYGDEKNPLYKYYEETGNYLTKYSKKDNGPVIKKIKYYGN | |
| | KLNAHLDITDDYPNSRNKVVKLSLKPYRFDVYLDNGVYKFVTVKNLDVIKKENYYEVNSKCYEEAKKL | |
| | KKISNQAEFIASFYNNDLIKINGELYRVIGVNNDLLNRIEVNMIDITYREYLENMNDKRPPRIIKTIA | |
| | SKTQSIKKYSTDILGNLYEVKSKKHPQIIKKG | |
| Geobacillus | MKYKIGLDIGITSIGWAVINLDIPRIEDLGVRIFDRAENPKTGESLALPRRLARSARRRLRRRKHRLE | 25 |
| thermo- | RIRRLFVREGILTKEELNKLFEKKHEIDVWQLRVEALDRKLNNDELARILLHLAKRRGFRSNRKSERT | |
| denitrificans | NKENSTMLKHIEENQSILSSYRTVAEMVVKDPKFSLHKRNKEDNYTNTVARDDLEREIKLIFAKQREY | |
| Cas9 | GNIVCTEAFEHEYISIWASQRPFASKDDIEKKVGFCTFEPKEKRAPKATYTFQSFTVWEHINKLRLVS | |
| | PGGIRALTDDERRLIYKQAFHKNKITFHDVRTLLNLPDDTRFKGLLYDRNTTLKENEKVRFLELGAYH | |
| | KIRKAIDSVYGKGAAKSFRPIDFDTFGYALTMFKDDTDIRSYLRNEYEQNGKRMENLADKVYDEELIE | |
| | ELLNLSFSKFGHLSLKALRNILPYMEQGEVYSTACERAGYTFTGPKKKQKTVLLPNIPPIANPVVMRA | |
| | LTQARKVVNAIIKKYGSPVSIHIELARELSQSFDERRKMQKEQEGNRKKNETAIRQLVEYGLTLNPTG | |
| | LDIVKFKLWSEQNGKCAYSLQPIEIERLLEPGYTEVDHVIPYSRSLDDSYTNKVLVLTKENREKGNRT | |
| | PAEYLGLGSERWQQFETFVLTNKQFSKKKRDRLLRLHYDENEENEFKNRNLNDTRYISRFLANFIREH | |
| | LKFADSDDKQKVYTVNGRITAHLRSRWNFNKNREESNLHHAVDAAIVACTTPSDIARVTAFYQRREQN | |
| | KELSKKTDPQFPQPWPHFADELQARLSKNPKESIKALNLGNYDNEKLESLQPVFVSRMPKRSITGAAH | |
| | QETLRRYIGIDERSGKIQTVVKKKLSEIQLDKTGHFPMYGKESDPRTYEAIRQRLLEHNNDPKKAFQE | |
| | PLYKPKKNGELGPIIRTIKIIDTTNQVIPLNDGKTVAYNSNIVRVDVFEKDGKYYCVPIYTIDMMKGI | |
| | LPNKAIEPNKPYSEWKEMTEDYTFRFSLYPNDLIRIEFPREKTIKTAVGEEIKIKDLFAYYQTIDSSN | |
| | GGLSLVSHDNNFSLRSIGSRTLKRFEKYQVDVLGNIYKVRGEKRVGVASSSHSKAGETIRPL | |
| ScCas9 | MEKKYSIGLDIGTNSVGWAVITDDYKVPSKKFKVLGNTNRKSIKKNLMGALLFDSGETAEATRLKRTA | 26 |
| S. canis | RRRYTRRKNRIRYLQEIFANEMAKLDDSFFQRLEESFLVEEDKKNERHPIFGNLADEVAYHRNYPTIY | |
| 1375 AA | HLRKKLADSPEKADLRLIYLALAHIIKFRGHFLIEGKLNAENSDVAKLFYQLIQTYNQLFEESPLDEI | |
| 159.2 kDa | EVDAKGILSARLSKSKRLEKLIAVFPNEKKNGLFGNIIALALGLTPNFKSNFDLTEDAKLQLSKDTYD | |
| | DDLDELLGQIGDQYADLFSAAKNLSDAILLSDILRSNSEVTKAPLSASMVKRYDEHHQDLALLKTLVR | |
| | QQFPEKYAEIFKDDTKNGYAGYVGIGIKHRKRTTKLATQEEFYKFIKPILEKMDGAEELLAKLNRDDL | |
| | LRKQRTFDNGSIPHQIHLKELHAILRRQEEFYPFLKENREKIEKILTFRIPYYVGPLARGNSRFAWLT | |
| | RKSEEAITPWNFEEVVDKGASAQSFIERMTNFDEQLPNKKVLPKHSLLYEYFTVYNELTKVKYVTERM | |
| | RKPEFLSGEQKKAIVDLLFKTNRKVTVKQLKEDYFKKIECFDSVEIIGVEDRFNASLGTYHDLLKIIK | |
| | DKDFLDNEENEDILEDIVLTLTLFEDREMIEERLKTYAHLFDDKVMKQLKRRHYTGWGRLSRKMINGI | |
| | RDKQSGKTILDFLKSDGFSNRNFMQLIHDDSLTFKEEIEKAQVSGQGDSLHEQIADLAGSPAIKKGIL | |
| | QTVKIVDELVKVMGHKPENIVIEMARENQTTTKGLQQSRERKKRIEEGIKELESQILKENPVENTQLQ | |
| | NEKLYLYYLQNGRDMYVDQELDINRLSDYDVDHIVPQSFIKDDSIDNKVLTRSVENRGKSDNVPSEEV | |
| | VKKMKNYWRQLLNAKLITQRKFDNLTKAERGGLSEADKAGFIKRQLVETRQITKHVARILDSRMNTKR | |
| | DKNDKPIREVKVITLKSKLVSDFRKDFQLYKVRDINNYHHAHDAYLNAVVGTALIKKYPKLESEFVYG | |
| | DYKVYDVRKMIAKSEQEIGKATAKRFFYSNIMNFFKTEVKLANGEIRKRPLIETNGETGEVVWNKEKD | |
| | FATVRKVLAMPQVNIVKKTEVQTGGFSKESILSKRESAKLIPRKKGWDTRKYGGFGSPTVAYSILVVA | |
| | KVEKGKAKKLKSVKVLVGITIMEKGSYEKDPIGFLEAKGYKDIKKELIFKLPKYSLFELENGRRRMLA | |
| | SATELQKANELVLPQHLVRLLYYTQNISATTGSNNLGYIEQHREEFKEIFEKIIDFSEKYILKNKVNS | |
| | NLKSSFDEQFAVSDSILLSNSFVSLLKYTSFGASGGFTFLDLDVKQGRLRYQTVTEVLDATLIYQSIT | |
| | GLYETRTDLSQLGGD | |

Dead Cas9 variant:

| | | |
|---|---|---|
| dead Cas9 or | MDKKYSIGLXIGTNSVGWAVITDEYKVPSKKFKVLGNTDRHSIKKNLIGALLFDSGETAEATRLKRTA | 27 |
| dCas 9 | RRRYTRRKNRICYLQEIFSNEMAKVDDSFFHRLEESFLVEEDKKHERHPIFGNIVDEVAYHEKYPTIY | |
| Streptococcus | HLRKKLVDSTDKADLRLIYLALAHMIKFRGHFLIEGDLNPDNSDVDKLFIQLVQTYNQLFEENPINAS | |
| pyogenes | GVDAKAILSARLSKSRRLENLIAQLPGEKKNGLFGNLIALSLGLTPNFKSNFDLAEDAKLQLSKDTYD | |
| Q99ZW2 Cas9 | DDLDNLLAQIGDQYADLFLAAKNLSDAILLSDILRVNTEITKAPLSASMIKRYDEHHQDLTLLKALVR | |
| with D10X and | QQLPEKYKEIFFDQSKNGYAGYIDGGASQEEFYKFIKPILEKMDGTEELLVKLNREDLLRKQRTFDNG | |
| H810X | SIPHQIHLGELHAILRRQEDFYPFLKDNREKIEKILTFRIPYYVGPLARGNSRFAWMTRKSEETITPW | |
| Where ″X″ is | NFEEVVDKGASAQSFIERMTNFDKNLPNEKVLPKHSLLYEYFTVYNELTKVKYVTEGMRKPAFLSGEQ | |
| any amino acid | KKAIVDLLFKTNRKVTVKQLKEDYFKKIECFDSVEISGVEDRFNASLGTYHDLLKIIKDKDFLDNEEN | |
| | EDILEDIVLTLTLFEDREMIEERLKTYAHLFDDKVMKQLKRRRYTGWGRLSRKLINGIRDKQSGKTIL | |
| | DFLKSDGFANRNFMQLIHDDSLTFKEDIQKAQVSGQGDSLHEHIANLAGSPAIKKGILQTVKVVDELV | |
| | KVMGRHKPENIVIEMARENQTTQKGQKNSRERMKRIEEGIKELGSQILKEHPVENTQLQNEKLYLYYL | |
| | QNGRDMYVDQELDINRLSDYDVDXIVPQSFLKDDSIDNKVLTRSDKNRGKSDNVPSEEVVKKMKNYWR | |
| | QLLNAKLITQRKFDNLTKAERGGLSELDKAGFIKRQLVETRQITKHVAQILDSRMNTKYDENDKLIRE | |
| | VKVITLKSKLVSDFRKDFQFYKVREINNYHHAHDAYLNAVVGTALIKKYPKLESEFVYGDYKVYDVRK | |
| | MIAKSEQEIGKATAKYFFYSNIMNFFKTEITLANGEIRKRPLIETNGETGEIVWDKGRDFATVRKVLS | |
| | MPQVNIVKKTEVQTGGFSKESILPKRNSDKLIARKKDWDPKKYGGFDSPTVAYSVLVVAKVEKGKSKK | |
| | LKSVKELLGITIMERSSFEKNPIDFLEAKGYKEVKKDLIIKLPKYSLFELENGRKRMLASAGELQKGN | |
| | ELALPSKYVNFLYLASHYEKLKGSPEDNEQKQLFVEQHKHYLDEIIEQISEFSKRVILADANLDKVLS | |
| | AYNKHRDKPIREQAENIIHLFTLTNLGAPAAFKYFDTTIDRKRYTSTKEVLDATLIHQSITGLYETRI | |
| | DLSQLGGD | |
| dead Cas9 or | MDKKYSIGLAIGTNSVGWAVITDEYKVPSKKFKVLGNTDRHSIKKNLIGALLFDSGETAEATRLKRTA | 28 |
| dCas 9 | RRRYTRRKNRICYLQEIFSNEMAKVDDSFFHRLEESFLVEEDKKHERHPIFGNIVDEVAYHEKYPTIY | |
| Streptococcus | HLRKKLVDSTDKADLRLIYLALAHMIKFRGHFLIEGDLNPDNSDVDKLFIQLVQTYNQLFEENPINAS | |
| pyogenes | GVDAKAILSARLSKSRRLENLIAQLPGEKKNGLFGNLIALSLGLTPNFKSNFDLAEDAKLQLSKDTYD | |
| Q99ZW2 Cas9 | DDLDNLLAQIGDQYADLFLAAKNLSDAILLSDILRVNTEITKAPLSASMIKRYDEHHQDLTLLKALVR | |
| with D10A and | QQLPEKYKEIFFDQSKNGYAGYIDGGASQEEFYKFIKPILEKMDGTEELLVKLNREDLLRKQRTFDNG | |
| H810A | SIPHQIHLGELHAILRRQEDFYPFLKDNREKIEKILTFRIPYYVGPLARGNSRFAWMTRKSEETITPW | |
| | NFEEVVDKGASAQSFIERMTNFDKNLPNEKVLPKHSLLYEYFTVYNELTKVKYVTEGMRKPAFLSGEQ | |
| | KKAIVDLLFKTNRKVTVKQLKEDYFKKIECFDSVEISGVEDRFNASLGTYHDLLKIIKDKDFLDNEEN | |
| | EDILEDIVLTLTLFEDREMIEERLKTYAHLFDDKVMKQLKRRRYTGWGRLSRKLINGIRDKQSGKTIL | |
| | DFLKSDGFANRNFMQLIHDDSLTFKEDIQKAQVSGQGDSLHEHIANLAGSPAIKKGILQTVKVVDELV | |
| | KVMGRHKPENIVIEMARENQTTQKGQKNSRERMKRIEEGIKELGSQILKEHPVENTQLQNEKLYLYYL | |
| | QNGRDMYVDQELDINRLSDYDVDAIVPQSFLKDDSIDNKVLTRSDKNRGKSDNVPSEEVVKKMKNYWR | |
| | QLLNAKLITQRKFDNLTKAERGGLSELDKAGFIKRQLVETRQITKHVAQILDSRMNTKYDENDKLIRE | |
| | VKVITLKSKLVSDFRKDFQFYKVREINNYHHAHDAYLNAVVGTALIKKYPKLESEFVYGDYKVYDVRK | |
| | MIAKSEQEIGKATAKYFFYSNIMNFFKTEITLANGEIRKRPLIETNGETGEIVWDKGRDFATVRKVLS | |
| | MPQVNIVKKTEVQTGGFSKESILPKRNSDKLIARKKDWDPKKYGGFDSPTVAYSVLVVAKVEKGKSKK | |
| | LKSVKELLGITIMERSSFEKNPIDFLEAKGYKEVKKDLIIKLPKYSLFELENGRKRMLASAGELQKGN | |
| | ELALPSKYVNFLYLASHYEKLKGSPEDNEQKQLFVEQHKHYLDEIIEQISEFSKRVILADANLDKVLS | |
| | AYNKHRDKPIREQAENIIHLFTLTNLGAPAAFKYFDTTIDRKRYTSTKEVLDATLIHQSITGLYETRI | |
| | DLSQLGGD | |

Cas9 nickase variant

| | | |
|---|---|---|
| Cas9 nickase | MDKKYSIGLXIGTNSVGWAVITDEYKVPSKKFKVLGNTDRHSIKKNLIGALLFDSGETAEATRLKRTA | 29 |
| Streptococcus | RRRYTRRKNRICYLQEIFSNEMAKVDDSFFHRLEESFLVEEDKKHERHPIFGNIVDEVAYHEKYPTIY | |
| pyogenes | HLRKKLVDSTDKADLRLIYLALAHMIKFRGHFLIEGDLNPDNSDVDKLFIQLVQTYNQLFEENPINAS | |
| Q99ZW2 Cas9 | GVDAKAILSARLSKSRRLENLIAQLPGEKKNGLFGNLIALSLGLTPNFKSNFDLAEDAKLQLSKDTYD | |
| with D10X, | DDLDNLLAQIGDQYADLFLAAKNLSDAILLSDILRVNTEITKAPLSASMIKRYDEHHQDLTLLKALVR | |
| wherein X is | QQLPEKYKEIFFDQSKNGYAGYIDGGASQEEFYKFIKPILEKMDGTEELLVKLNREDLLRKQRTFDNG | |
| any alternate | SIPHQIHLGELHAILRRQEDFYPFLKDNREKIEKILTFRIPYYVGPLARGNSRFAWMTRKSEETITPW | |
| amino acid | NFEEVVDKGASAQSFIERMTNFDKNLPNEKVLPKHSLLYEYFTVYNELTKVKYVTEGMRKPAFLSGEQ | |
| | KKAIVDLLFKTNRKVTVKQLKEDYFKKIECFDSVEISGVEDRFNASLGTYHDLLKIIKDKDFLDNEEN | |
| | EDILEDIVLTLTLFEDREMIEERLKTYAHLFDDKVMKQLKRRRYTGWGRLSRKLINGIRDKQSGKTIL | |
| | DFLKSDGFANRNFMQLIHDDSLTFKEDIQKAQVSGQGDSLHEHIANLAGSPAIKKGILQTVKVVDELV | |
| | KVMGRHKPENIVIEMARENQTTQKGQKNSRERMKRIEEGIKELGSQILKEHPVENTQLQNEKLYLYYL | |
| | QNGRDMYVDQELDINRLSDYDVDHIVPQSFLKDDSIDNKVLTRSDKNRGKSDNVPSEEVVKKMKNYWR | |
| | QLLNAKLITQRKFDNLTKAERGGLSELDKAGFIKRQLVETRQITKHVAQILDSRMNTKYDENDKLIRE | |
| | VKVITLKSKLVSDFRKDFQFYKVREINNYHHAHDAYLNAVVGTALIKKYPKLESEFVYGDYKVYDVRK | |
| | MIAKSEQEIGKATAKYFFYSNIMNFFKTEITLANGEIRKRPLIETNGETGEIVWDKGRDFATVRKVLS | |
| | MPQVNIVKKTEVQTGGFSKESILPKRNSDKLIARKKDWDPKKYGGFDSPTVAYSVLVVAKVEKGKSKK | |
| | LKSVKELLGITIMERSSFEKNPIDFLEAKGYKEVKKDLIIKLPKYSLFELENGRKRMLASAGELQKGN | |
| | ELALPSKYVNFLYLASHYEKLKGSPEDNEQKQLFVEQHKHYLDEIIEQISEFSKRVILADANLDKVLS | |
| | AYNKHRDKPIREQAENIIHLFTLTNLGAPAAFKYFDTTIDRKRYTSTKEVLDATLIHQSITGLYETRI | |
| | DLSQLGGD | |
| Cas9 nickase | MDKKYSIGLDIGTNSVGWAVITDEYKVPSKKFKVLGNTDRHSIKKNLIGALLFDSGETAEATRLKRTA | 30 |
| Streptococcus | RRRYTRRKNRICYLQEIFSNEMAKVDDSFFHRLEESFLVEEDKKHERHPIFGNIVDEVAYHEKYPTIY | |
| pyogenes | HLRKKLVDSTDKADLRLIYLALAHMIKFRGHFLIEGDLNPDNSDVDKLFIQLVQTYNQLFEENPINAS | |
| Q99ZW2 Cas9 | GVDAKAILSARLSKSRRLENLIAQLPGEKKNGLFGNLIALSLGLTPNFKSNFDLAEDAKLQLSKDTYD | |
| with E762X, | DDLDNLLAQIGDQYADLFLAAKNLSDAILLSDILRVNTEITKAPLSASMIKRYDEHHQDLTLLKALVR | |
| wherein X is | QQLPEKYKEIFFDQSKNGYAGYIDGGASQEEFYKFIKPILEKMDGTEELLVKLNREDLLRKQRTFDNG | |
| any alternate | SIPHQIHLGELHAILRRQEDFYPFLKDNREKIEKILTFRIPYYVGPLARGNSRFAWMTRKSEETITPW | |
| amino acid | NFEEVVDKGASAQSFIERMTNFDKNLPNEKVLPKHSLLYEYFTVYNELTKVKYVTEGMRKPAFLSGEQ | |
| | KKAIVDLLFKTNRKVTVKQLKEDYFKKIECFDSVEISGVEDRFNASLGTYHDLLKIIKDKDFLDNEEN | |
| | EDILEDIVLTLTLFEDREMIEERLKTYAHLFDDKVMKQLKRRRYTGWGRLSRKLINGIRDKQSGKTIL | |
| | DFLKSDGFANRNFMQLIHDDSLTFKEDIQKAQVSGQGDSLHEHIANLAGSPAIKKGILQTVKVVDELV | |
| | KVMGRHKPENIVIXMARENQTTQKGQKNSRERMKRIEEGIKELGSQILKEHPVENTQLQNEKLYLYYL | |
| | QNGRDMYVDQELDINRLSDYDVDHIVPQSFLKDDSIDNKVLTRSDKNRGKSDNVPSEEVVKKMKNYWR | |
| | QLLNAKLITQRKFDNLTKAERGGLSELDKAGFIKRQLVETRQITKHVAQILDSRMNTKYDENDKLIRE | |
| | VKVITLKSKLVSDFRKDFQFYKVREINNYHHAHDAYLNAVVGTALIKKYPKLESEFVYGDYKVYDVRK | |
| | MIAKSEQEIGKATAKYFFYSNIMNFFKTEITLANGEIRKRPLIETNGETGEIVWDKGRDFATVRKVLS | |
| | MPQVNIVKKTEVQTGGFSKESILPKRNSDKLIARKKDWDPKKYGGFDSPTVAYSVLVVAKVEKGKSKK | |
| | LKSVKELLGITIMERSSFEKNPIDFLEAKGYKEVKKDLIIKLPKYSLFELENGRKRMLASAGELQKGN | |
| | ELALPSKYVNFLYLASHYEKLKGSPEDNEQKQLFVEQHKHYLDEIIEQISEFSKRVILADANLDKVLS | |
| | AYNKHRDKPIREQAENIIHLFTLTNLGAPAAFKYFDTTIDRKRYTSTKEVLDATLIHQSITGLYETRI | |
| | DLSQLGGD | |
| Cas9 nickase | MDKKYSIGLDIGTNSVGWAVITDEYKVPSKKFKVLGNTDRHSIKKNLIGALLFDSGETAEATRLKRTA | 31 |
| Streptococcus | RRRYTRRKNRICYLQEIFSNEMAKVDDSFFHRLEESFLVEEDKKHERHPIFGNIVDEVAYHEKYPTIY | |
| pyogenes | HLRKKLVDSTDKADLRLIYLALAHMIKFRGHFLIEGDLNPDNSDVDKLFIQLVQTYNQLFEENPINAS | |
| Q99ZW2 Cas9 | GVDAKAILSARLSKSRRLENLIAQLPGEKKNGLFGNLIALSLGLTPNFKSNFDLAEDAKLQLSKDTYD | |
| with H983X, | DDLDNLLAQIGDQYADLFLAAKNLSDAILLSDILRVNTEITKAPLSASMIKRYDEHHQDLTLLKALVR | |
| wherein X is | QQLPEKYKEIFFDQSKNGYAGYIDGGASQEEFYKFIKPILEKMDGTEELLVKLNREDLLRKQRTFDNG | |
| any alternate | SIPHQIHLGELHAILRRQEDFYPFLKDNREKIEKILTFRIPYYVGPLARGNSRFAWMTRKSEETITPW | |
| amino acid | NFEEVVDKGASAQSFIERMTNFDKNLPNEKVLPKHSLLYEYFTVYNELTKVKYVTEGMRKPAFLSGEQ | |
| | KKAIVDLLFKTNRKVTVKQLKEDYFKKIECFDSVEISGVEDRFNASLGTYHDLLKIIKDKDFLDNEEN | |
| | EDILEDIVLTLTLFEDREMIEERLKTYAHLFDDKVMKQLKRRRYTGWGRLSRKLINGIRDKQSGKTIL | |
| | DFLKSDGFANRNFMQLIHDDSLTFKEDIQKAQVSGQGDSLHEHIANLAGSPAIKKGILQTVKVVDELV | |
| | KVMGRHKPENIVIEMARENQTTQKGQKNSRERMKRIEEGIKELGSQILKEHPVENTQLQNEKLYLYYL | |
| | QNGRDMYVDQELDINRLSDYDVDHIVPQSFLKDDSIDNKVLTRSDKNRGKSDNVPSEEVVKKMKNYWR | |
| | QLLNAKLITQRKFDNLTKAERGGLSELDKAGFIKRQLVETRQITKHVAQILDSRMNTKYDENDKLIRE | |
| | VKVITLKSKLVSDFRKDFQFYKVREINNYHXAHDAYLNAVVGTALIKKYPKLESEFVYGDYKVYDVRK | |
| | MIAKSEQEIGKATAKYFFYSNIMNFFKTEITLANGEIRKRPLIETNGETGEIVWDKGRDFATVRKVLS | |
| | MPQVNIVKKTEVQTGGFSKESILPKRNSDKLIARKKDWDPKKYGGFDSPTVAYSVLVVAKVEKGKSKK | |
| | LKSVKELLGITIMERSSFEKNPIDFLEAKGYKEVKKDLIIKLPKYSLFELENGRKRMLASAGELQKGN | |
| | ELALPSKYVNFLYLASHYEKLKGSPEDNEQKQLFVEQHKHYLDEIIEQISEFSKRVILADANLDKVLS | |
| | AYNKHRDKPIREQAENIIHLFTLTNLGAPAAFKYFDTTIDRKRYTSTKEVLDATLIHQSITGLYETRI | |
| | DLSQLGGD | |
| Cas9 nickase | MDKKYSIGLDIGTNSVGWAVITDEYKVPSKKFKVLGNTDRHSIKKNLIGALLFDSGETAEATRLKRTA | 32 |
| Streptococcus | RRRYTRRKNRICYLQEIFSNEMAKVDDSFFHRLEESFLVEEDKKHERHPIFGNIVDEVAYHEKYPTIY | |
| pyogenes | HLRKKLVDSTDKADLRLIYLALAHMIKFRGHFLIEGDLNPDNSDVDKLFIQLVQTYNQLFEENPINAS | |
| Q99ZW2 Cas9 | GVDAKAILSARLSKSRRLENLIAQLPGEKKNGLFGNLIALSLGLTPNFKSNFDLAEDAKLQLSKDTYD | |
| with D986X, | DDLDNLLAQIGDQYADLFLAAKNLSDAILLSDILRVNTEITKAPLSASMIKRYDEHHQDLTLLKALVR | |
| wherein X is | QQLPEKYKEIFFDQSKNGYAGYIDGGASQEEFYKFIKPILEKMDGTEELLVKLNREDLLRKQRTFDNG | |
| any alternate | SIPHQIHLGELHAILRRQEDFYPFLKDNREKIEKILTFRIPYYVGPLARGNSRFAWMTRKSEETITPW | |
| amino acid | NFEEVVDKGASAQSFIERMTNFDKNLPNEKVLPKHSLLYEYFTVYNELTKVKYVTEGMRKPAFLSGEQ | |
| | KKAIVDLLFKTNRKVTVKQLKEDYFKKIECFDSVEISGVEDRFNASLGTYHDLLKIIKDKDFLDNEEN | |
| | EDILEDIVLTLTLFEDREMIEERLKTYAHLFDDKVMKQLKRRRYTGWGRLSRKLINGIRDKQSGKTIL | |
| | DFLKSDGFANRNFMQLIHDDSLTFKEDIQKAQVSGQGDSLHEHIANLAGSPAIKKGILQTVKVVDELV | |
| | KVMGRHKPENIVIEMARENQTTQKGQKNSRERMKRIEEGIKELGSQILKEHPVENTQLQNEKLYLYYL | |
| | QNGRDMYVDQELDINRLSDYDVDHIVPQSFLKDDSIDNKVLTRSDKNRGKSDNVPSEEVVKKMKNYWR | |
| | QLLNAKLITQRKFDNLTKAERGGLSELDKAGFIKRQLVETRQITKHVAQILDSRMNTKYDENDKLIRE | |
| | VKVITLKSKLVSDFRKDFQFYKVREINNYHHAHXAYLNAVVGTALIKKYPKLESEFVYGDYKVYDVRK | |
| | MIAKSEQEIGKATAKYFFYSNIMNFFKTEITLANGEIRKRPLIETNGETGEIVWDKGRDFATVRKVLS | |
| | MPQVNIVKKTEVQTGGFSKESILPKRNSDKLIARKKDWDPKKYGGFDSPTVAYSVLVVAKVEKGKSKK | |
| | LKSVKELLGITIMERSSFEKNPIDFLEAKGYKEVKKDLIIKLPKYSLFELENGRKRMLASAGELQKGN | |
| | ELALPSKYVNFLYLASHYEKLKGSPEDNEQKQLFVEQHKHYLDEIIEQISEFSKRVILADANLDKVLS | |
| | AYNKHRDKPIREQAENIIHLFTLTNLGAPAAFKYFDTTIDRKRYTSTKEVLDATLIHQSITGLYETRI | |
| | DLSQLGGD | |
| Cas9 nickase | MDKKYSIGLAIGTNSVGWAVITDEYKVPSKKFKVLGNTDRHSIKKNLIGALLFDSGETAEATRLKRTA | 33 |
| Streptococcus | RRRYTRRKNRICYLQEIFSNEMAKVDDSFFHRLEESFLVEEDKKHERHPIFGNIVDEVAYHEKYPTIY | |
| pyogenes | HLRKKLVDSTDKADLRLIYLALAHMIKFRGHFLIEGDLNPDNSDVDKLFIQLVQTYNQLFEENPINAS | |
| Q99ZW2 Cas9 | GVDAKAILSARLSKSRRLENLIAQLPGEKKNGLFGNLIALSLGLTPNFKSNFDLAEDAKLQLSKDTYD | |
| with D10A | DDLDNLLAQIGDQYADLFLAAKNLSDAILLSDILRVNTEITKAPLSASMIKRYDEHHQDLTLLKALVR | |
| | QQLPEKYKEIFFDQSKNGYAGYIDGGASQEEFYKFIKPILEKMDGTEELLVKLNREDLLRKQRTFDNG | |
| | SIPHQIHLGELHAILRRQEDFYPFLKDNREKIEKILTFRIPYYVGPLARGNSRFAWMTRKSEETITPW | |
| | NFEEVVDKGASAQSFIERMTNFDKNLPNEKVLPKHSLLYEYFTVYNELTKVKYVTEGMRKPAFLSGEQ | |
| | KKAIVDLLFKTNRKVTVKQLKEDYFKKIECFDSVEISGVEDRFNASLGTYHDLLKIIKDKDFLDNEEN | |
| | EDILEDIVLTLTLFEDREMIEERLKTYAHLFDDKVMKQLKRRRYTGWGRLSRKLINGIRDKQSGKTIL | |
| | DFLKSDGFANRNFMQLIHDDSLTFKEDIQKAQVSGQGDSLHEHIANLAGSPAIKKGILQTVKVVDELV | |
| | KVMGRHKPENIVIEMARENQTTQKGQKNSRERMKRIEEGIKELGSQILKEHPVENTQLQNEKLYLYYL | |
| | QNGRDMYVDQELDINRLSDYDVDHIVPQSFLKDDSIDNKVLTRSDKNRGKSDNVPSEEVVKKMKNYWR | |
| | QLLNAKLITQRKFDNLTKAERGGLSELDKAGFIKRQLVETRQITKHVAQILDSRMNTKYDENDKLIRE | |
| | VKVITLKSKLVSDFRKDFQFYKVREINNYHHAHDAYLNAVVGTALIKKYPKLESEFVYGDYKVYDVRK | |
| | MIAKSEQEIGKATAKYFFYSNIMNFFKTEITLANGEIRKRPLIETNGETGEIVWDKGRDFATVRKVLS | |
| | MPQVNIVKKTEVQTGGFSKESILPKRNSDKLIARKKDWDPKKYGGFDSPTVAYSVLVVAKVEKGKSKK | |
| | LKSVKELLGITIMERSSFEKNPIDFLEAKGYKEVKKDLIIKLPKYSLFELENGRKRMLASAGELQKGN | |
| | ELALPSKYVNFLYLASHYEKLKGSPEDNEQKQLFVEQHKHYLDEIIEQISEFSKRVILADANLDKVLS | |
| | AYNKHRDKPIREQAENIIHLFTLTNLGAPAAFKYFDTTIDRKRYTSTKEVLDATLIHQSITGLYETRI | |
| | DLSQLGGD | |
| Cas9 nickase | MDKKYSIGLDIGTNSVGWAVITDEYKVPSKKFKVLGNTDRHSIKKNLIGALLFDSGETAEATRLKRTA | 34 |
| Streptococcus | RRRYTRRKNRICYLQEIFSNEMAKVDDSFFHRLEESFLVEEDKKHERHPIFGNIVDEVAYHEKYPTIY | |
| pyogenes | HLRKKLVDSTDKADLRLIYLALAHMIKFRGHFLIEGDLNPDNSDVDKLFIQLVQTYNQLFEENPINAS | |
| Q99ZW2 Cas9 | GVDAKAILSARLSKSRRLENLIAQLPGEKKNGLFGNLIALSLGLTPNFKSNFDLAEDAKLQLSKDTYD | |
| with E762A | DDLDNLLAQIGDQYADLFLAAKNLSDAILLSDILRVNTEITKAPLSASMIKRYDEHHQDLTLLKALVR | |
| | QQLPEKYKEIFFDQSKNGYAGYIDGGASQEEFYKFIKPILEKMDGTEELLVKLNREDLLRKQRTFDNG | |
| | SIPHQIHLGELHAILRRQEDFYPFLKDNREKIEKILTFRIPYYVGPLARGNSRFAWMTRKSEETITPW | |
| | NFEEVVDKGASAQSFIERMTNFDKNLPNEKVLPKHSLLYEYFTVYNELTKVKYVTEGMRKPAFLSGEQ | |
| | KKAIVDLLFKTNRKVTVKQLKEDYFKKIECFDSVEISGVEDRFNASLGTYHDLLKIIKDKDFLDNEEN | |
| | EDILEDIVLTLTLFEDREMIEERLKTYAHLFDDKVMKQLKRRRYTGWGRLSRKLINGIRDKQSGKTIL | |
| | DFLKSDGFANRNFMQLIHDDSLTFKEDIQKAQVSGQGDSLHEHIANLAGSPAIKKGILQTVKVVDELV | |
| | KVMGRHKPENIVIAMARENQTTQKGQKNSRERMKRIEEGIKELGSQILKEHPVENTQLQNEKLYLYYL | |
| | QNGRDMYVDQELDINRLSDYDVDHIVPQSFLKDDSIDNKVLTRSDKNRGKSDNVPSEEVVKKMKNYWR | |
| | QLLNAKLITQRKFDNLTKAERGGLSELDKAGFIKRQLVETRQITKHVAQILDSRMNTKYDENDKLIRE | |
| | VKVITLKSKLVSDFRKDFQFYKVREINNYHHAHDAYLNAVVGTALIKKYPKLESEFVYGDYKVYDVRK | |
| | MIAKSEQEIGKATAKYFFYSNIMNFFKTEITLANGEIRKRPLIETNGETGEIVWDKGRDFATVRKVLS | |
| | MPQVNIVKKTEVQTGGFSKESILPKRNSDKLIARKKDWDPKKYGGFDSPTVAYSVLVVAKVEKGKSKK | |
| | LKSVKELLGITIMERSSFEKNPIDFLEAKGYKEVKKDLIIKLPKYSLFELENGRKRMLASAGELQKGN | |
| | ELALPSKYVNFLYLASHYEKLKGSPEDNEQKQLFVEQHKHYLDEIIEQISEFSKRVILADANLDKVLS | |
| | AYNKHRDKPIREQAENIIHLFTLTNLGAPAAFKYFDTTIDRKRYTSTKEVLDATLIHQSITGLYETRI | |
| | DLSQLGGD | |
| Cas9 nickase | MDKKYSIGLDIGTNSVGWAVITDEYKVPSKKFKVLGNTDRHSIKKNLIGALLFDSGETAEATRLKRTA | 35 |
| Streptococcus | RRRYTRRKNRICYLQEIFSNEMAKVDDSFFHRLEESFLVEEDKKHERHPIFGNIVDEVAYHEKYPTIY | |
| pyogenes | HLRKKLVDSTDKADLRLIYLALAHMIKFRGHFLIEGDLNPDNSDVDKLFIQLVQTYNQLFEENPINAS | |
| Q99ZW2 Cas9 | GVDAKAILSARLSKSRRLENLIAQLPGEKKNGLFGNLIALSLGLTPNFKSNFDLAEDAKLQLSKDTYD | |
| with H983A | DDLDNLLAQIGDQYADLFLAAKNLSDAILLSDILRVNTEITKAPLSASMIKRYDEHHQDLTLLKALVR | |
| | QQLPEKYKEIFFDQSKNGYAGYIDGGASQEEFYKFIKPILEKMDGTEELLVKLNREDLLRKQRTFDNG | |
| | SIPHQIHLGELHAILRRQEDFYPFLKDNREKIEKILTFRIPYYVGPLARGNSRFAWMTRKSEETITPW | |
| | NFEEVVDKGASAQSFIERMTNFDKNLPNEKVLPKHSLLYEYFTVYNELTKVKYVTEGMRKPAFLSGEQ | |
| | KKAIVDLLFKTNRKVTVKQLKEDYFKKIECFDSVEISGVEDRFNASLGTYHDLLKIIKDKDFLDNEEN | |
| | EDILEDIVLTLTLFEDREMIEERLKTYAHLFDDKVMKQLKRRRYTGWGRLSRKLINGIRDKQSGKTIL | |
| | DFLKSDGFANRNFMQLIHDDSLTFKEDIQKAQVSGQGDSLHEHIANLAGSPAIKKGILQTVKVVDELV | |
| | KVMGRHKPENIVIEMARENQTTQKGQKNSRERMKRIEEGIKELGSQILKEHPVENTQLQNEKLYLYYL | |
| | QNGRDMYVDQELDINRLSDYDVDHIVPQSFLKDDSIDNKVLTRSDKNRGKSDNVPSEEVVKKMKNYWR | |
| | QLLNAKLITQRKFDNLTKAERGGLSELDKAGFIKRQLVETRQITKHVAQILDSRMNTKYDENDKLIRE | |
| | VKVITLKSKLVSDFRKDFQFYKVREINNYHAAHDAYLNAVVGTALIKKYPKLESEFVYGDYKVYDVRK | |
| | MIAKSEQEIGKATAKYFFYSNIMNFFKTEITLANGEIRKRPLIETNGETGEIVWDKGRDFATVRKVLS | |
| | MPQVNIVKKTEVQTGGFSKESILPKRNSDKLIARKKDWDPKKYGGFDSPTVAYSVLVVAKVEKGKSKK | |
| | LKSVKELLGITIMERSSFEKNPIDFLEAKGYKEVKKDLIIKLPKYSLFELENGRKRMLASAGELQKGN | |
| | ELALPSKYVNFLYLASHYEKLKGSPEDNEQKQLFVEQHKHYLDEIIEQISEFSKRVILADANLDKVLS | |
| | AYNKHRDKPIREQAENIIHLFTLTNLGAPAAFKYFDTTIDRKRYTSTKEVLDATLIHQSITGLYETRI | |
| | DLSQLGGD | |
| Cas9 nickase | MDKKYSIGLDIGTNSVGWAVITDEYKVPSKKFKVLGNTDRHSIKKNLIGALLFDSGETAEATRLKRTA | 36 |
| Streptococcus | RRRYTRRKNRICYLQEIFSNEMAKVDDSFFHRLEESFLVEEDKKHERHPIFGNIVDEVAYHEKYPTIY | |
| pyogenes | HLRKKLVDSTDKADLRLIYLALAHMIKFRGHFLIEGDLNPDNSDVDKLFIQLVQTYNQLFEENPINAS | |
| Q99ZW2 Cas9 | GVDAKAILSARLSKSRRLENLIAQLPGEKKNGLFGNLIALSLGLTPNFKSNFDLAEDAKLQLSKDTYD | |
| with D986A | DDLDNLLAQIGDQYADLFLAAKNLSDAILLSDILRVNTEITKAPLSASMIKRYDEHHQDLTLLKALVR | |
| | QQLPEKYKEIFFDQSKNGYAGYIDGGASQEEFYKFIKPILEKMDGTEELLVKLNREDLLRKQRTFDNG | |
| | SIPHQIHLGELHAILRRQEDFYPFLKDNREKIEKILTFRIPYYVGPLARGNSRFAWMTRKSEETITPW | |
| | NFEEVVDKGASAQSFIERMTNFDKNLPNEKVLPKHSLLYEYFTVYNELTKVKYVTEGMRKPAFLSGEQ | |
| | KKAIVDLLFKTNRKVTVKQLKEDYFKKIECFDSVEISGVEDRFNASLGTYHDLLKIIKDKDFLDNEEN | |
| | EDILEDIVLTLTLFEDREMIEERLKTYAHLFDDKVMKQLKRRRYTGWGRLSRKLINGIRDKQSGKTIL | |
| | DFLKSDGFANRNFMQLIHDDSLTFKEDIQKAQVSGQGDSLHEHIANLAGSPAIKKGILQTVKVVDELV | |
| | KVMGRHKPENIVIEMARENQTTQKGQKNSRERMKRIEEGIKELGSQILKEHPVENTQLQNEKLYLYYL | |
| | QNGRDMYVDQELDINRLSDYDVDHIVPQSFLKDDSIDNKVLTRSDKNRGKSDNVPSEEVVKKMKNYWR | |
| | QLLNAKLITQRKFDNLTKAERGGLSELDKAGFIKRQLVETRQITKHVAQILDSRMNTKYDENDKLIRE | |
| | VKVITLKSKLVSDFRKDFQFYKVREINNYHHAHAAYLNAVVGTALIKKYPKLESEFVYGDYKVYDVRK | |
| | MIAKSEQEIGKATAKYFFYSNIMNFFKTEITLANGEIRKRPLIETNGETGEIVWDKGRDFATVRKVLS | |
| | MPQVNIVKKTEVQTGGFSKESILPKRNSDKLIARKKDWDPKKYGGFDSPTVAYSVLVVAKVEKGKSKK | |
| | LKSVKELLGITIMERSSFEKNPIDFLEAKGYKEVKKDLIIKLPKYSLFELENGRKRMLASAGELQKGN | |
| | ELALPSKYVNFLYLASHYEKLKGSPEDNEQKQLFVEQHKHYLDEIIEQISEFSKRVILADANLDKVLS | |
| | AYNKHRDKPIREQAENIIHLFTLTNLGAPAAFKYFDTTIDRKRYTSTKEVLDATLIHQSITGLYETRI | |
| | DLSQLGGD | |
| Cas9 nickase | MDKKYSIGLDIGTNSVGWAVITDEYKVPSKKFKVLGNTDRHSIKKNLIGALLFDSGETAEATRLKRTA | 37 |
| Streptococcus | RRRYTRRKNRICYLQEIFSNEMAKVDDSFFHRLEESFLVEEDKKHERHPIFGNIVDEVAYHEKYPTIY | |
| pyogenes | HLRKKLVDSTDKADLRLIYLALAHMIKFRGHFLIEGDLNPDNSDVDKLFIQLVQTYNQLFEENPINAS | |
| Q99ZW2 Cas9 | GVDAKAILSARLSKSRRLENLIAQLPGEKKNGLFGNLIALSLGLTPNFKSNFDLAEDAKLQLSKDTYD | |
| with H840X, | DDLDNLLAQIGDQYADLFLAAKNLSDAILLSDILRVNTEITKAPLSASMIKRYDEHHQDLTLLKALVR | |
| wherein X is | QQLPEKYKEIFFDQSKNGYAGYIDGGASQEEFYKFIKPILEKMDGTEELLVKLNREDLLRKQRTFDNG | |
| any alternate | SIPHQIHLGELHAILRRQEDFYPFLKDNREKIEKILTFRIPYYVGPLARGNSRFAWMTRKSEETITPW | |
| amino acid | NFEEVVDKGASAQSFIERMTNFDKNLPNEKVLPKHSLLYEYFTVYNELTKVKYVTEGMRKPAFLSGEQ | |
| | KKAIVDLLFKTNRKVTVKQLKEDYFKKIECFDSVEISGVEDRFNASLGTYHDLLKIIKDKDFLDNEEN | |
| | EDILEDIVLTLTLFEDREMIEERLKTYAHLFDDKVMKQLKRRRYTGWGRLSRKLINGIRDKQSGKTIL | |
| | DFLKSDGFANRNFMQLIHDDSLTFKEDIQKAQVSGQGDSLHEHIANLAGSPAIKKGILQTVKVVDELV | |
| | KVMGRHKPENIVIEMARENQTTQKGQKNSRERMKRIEEGIKELGSQILKEHPVENTQLQNEKLYLYYL | |
| | QNGRDMYVDQELDINRLSDYDVDXIVPQSFLKDDSIDNKVLTRSDKNRGKSDNVPSEEVVKKMKNYWR | |
| | QLLNAKLITQRKFDNLTKAERGGLSELDKAGFIKRQLVETRQITKHVAQILDSRMNTKYDENDKLIRE | |
| | VKVITLKSKLVSDFRKDFQFYKVREINNYHHAHDAYLNAVVGTALIKKYPKLESEFVYGDYKVYDVRK | |
| | MIAKSEQEIGKATAKYFFYSNIMNFFKTEITLANGEIRKRPLIETNGETGEIVWDKGRDFATVRKVLS | |
| | MPQVNIVKKTEVQTGGFSKESILPKRNSDKLIARKKDWDPKKYGGFDSPTVAYSVLVVAKVEKGKSKK | |
| | LKSVKELLGITIMERSSFEKNPIDFLEAKGYKEVKKDLIIKLPKYSLFELENGRKRMLASAGELQKGN | |
| | ELALPSKYVNFLYLASHYEKLKGSPEDNEQKQLFVEQHKHYLDEIIEQISEFSKRVILADANLDKVLS | |
| | AYNKHRDKPIREQAENIIHLFTLTNLGAPAAFKYFDTTIDRKRYTSTKEVLDATLIHQSITGLYETRI | |
| | DLSQLGGD | |
| Cas9 nickase | MDKKYSIGLDIGTNSVGWAVITDEYKVPSKKFKVLGNTDRHSIKKNLIGALLFDSGETAEATRLKRTA | 38 |
| Streptococcus | RRRYTRRKNRICYLQEIFSNEMAKVDDSFFHRLEESFLVEEDKKHERHPIFGNIVDEVAYHEKYPTIY | |
| pyogenes | HLRKKLVDSTDKADLRLIYLALAHMIKFRGHFLIEGDLNPDNSDVDKLFIQLVQTYNQLFEENPINAS | |
| Q99ZW2 Cas9 | GVDAKAILSARLSKSRRLENLIAQLPGEKKNGLFGNLIALSLGLTPNFKSNFDLAEDAKLQLSKDTYD | |
| with H840A, | DDLDNLLAQIGDQYADLFLAAKNLSDAILLSDILRVNTEITKAPLSASMIKRYDEHHQDLTLLKALVR | |
| wherein X is | QQLPEKYKEIFFDQSKNGYAGYIDGGASQEEFYKFIKPILEKMDGTEELLVKLNREDLLRKQRTFDNG | |
| any alternate | SIPHQIHLGELHAILRRQEDFYPFLKDNREKIEKILTFRIPYYVGPLARGNSRFAWMTRKSEETITPW | |
| amino acid | NFEEVVDKGASAQSFIERMTNFDKNLPNEKVLPKHSLLYEYFTVYNELTKVKYVTEGMRKPAFLSGEQ | |
| | KKAIVDLLFKTNRKVTVKQLKEDYFKKIECFDSVEISGVEDRFNASLGTYHDLLKIIKDKDFLDNEEN | |
| | EDILEDIVLTLTLFEDREMIEERLKTYAHLFDDKVMKQLKRRRYTGWGRLSRKLINGIRDKQSGKTIL | |
| | DFLKSDGFANRNFMQLIHDDSLTFKEDIQKAQVSGQGDSLHEHIANLAGSPAIKKGILQTVKVVDELV | |
| | KVMGRHKPENIVIEMARENQTTQKGQKNSRERMKRIEEGIKELGSQILKEHPVENTQLQNEKLYLYYL | |
| | QNGRDMYVDQELDINRLSDYDVDAIVPQSFLKDDSIDNKVLTRSDKNRGKSDNVPSEEVVKKMKNYWR | |
| | QLLNAKLITQRKFDNLTKAERGGLSELDKAGFIKRQLVETRQITKHVAQILDSRMNTKYDENDKLIRE | |
| | VKVITLKSKLVSDFRKDFQFYKVREINNYHHAHDAYLNAVVGTALIKKYPKLESEFVYGDYKVYDVRK | |
| | MIAKSEQEIGKATAKYFFYSNIMNFFKTEITLANGEIRKRPLIETNGETGEIVWDKGRDFATVRKVLS | |
| | MPQVNIVKKTEVQTGGFSKESILPKRNSDKLIARKKDWDPKKYGGFDSPTVAYSVLVVAKVEKGKSKK | |
| | LKSVKELLGITIMERSSFEKNPIDFLEAKGYKEVKKDLIIKLPKYSLFELENGRKRMLASAGELQKGN | |
| | ELALPSKYVNFLYLASHYEKLKGSPEDNEQKQLFVEQHKHYLDEIIEQISEFSKRVILADANLDKVLS | |
| | AYNKHRDKPIREQAENIIHLFTLTNLGAPAAFKYFDTTIDRKRYTSTKEVLDATLIHQSITGLYETRI | |
| | DLSQLGGD | |
| Cas9 nickase | MDKKYSIGLDIGTNSVGWAVITDEYKVPSKKFKVLGNTDRHSIKKNLIGALLFDSGETAEATRLKRTA | 39 |
| Streptococcus | RRRYTRRKNRICYLQEIFSNEMAKVDDSFFHRLEESFLVEEDKKHERHPIFGNIVDEVAYHEKYPTIY | |
| pyogenes | HLRKKLVDSTDKADLRLIYLALAHMIKFRGHFLIEGDLNPDNSDVDKLFIQLVQTYNQLFEENPINAS | |
| Q99ZW2 Cas9 | GVDAKAILSARLSKSRRLENLIAQLPGEKKNGLFGNLIALSLGLTPNFKSNFDLAEDAKLQLSKDTYD | |
| with R863X, | DDLDNLLAQIGDQYADLFLAAKNLSDAILLSDILRVNTEITKAPLSASMIKRYDEHHQDLTLLKALVR | |
| wherein X is | QQLPEKYKEIFFDQSKNGYAGYIDGGASQEEFYKFIKPILEKMDGTEELLVKLNREDLLRKQRTFDNG | |
| any alternate | SIPHQIHLGELHAILRRQEDFYPFLKDNREKIEKILTFRIPYYVGPLARGNSRFAWMTRKSEETITPW | |
| amino acid | NFEEVVDKGASAQSFIERMTNFDKNLPNEKVLPKHSLLYEYFTVYNELTKVKYVTEGMRKPAFLSGEQ | |
| | KKAIVDLLFKTNRKVTVKQLKEDYFKKIECFDSVEISGVEDRFNASLGTYHDLLKIIKDKDFLDNEEN | |
| | EDILEDIVLTLTLFEDREMIEERLKTYAHLFDDKVMKQLKRRRYTGWGRLSRKLINGIRDKQSGKTIL | |
| | DFLKSDGFANRNFMQLIHDDSLTFKEDIQKAQVSGQGDSLHEHIANLAGSPAIKKGILQTVKVVDELV | |
| | KVMGRHKPENIVIEMARENQTTQKGQKNSRERMKRIEEGIKELGSQILKEHPVENTQLQNEKLYLYYL | |
| | QNGRDMYVDQELDINRLSDYDVDHIVPQSFLKDDSIDNKVLTRSDKNXGKSDNVPSEEVVKKMKNYWR | |
| | QLLNAKLITQRKFDNLTKAERGGLSELDKAGFIKRQLVETRQITKHVAQILDSRMNTKYDENDKLIRE | |
| | VKVITLKSKLVSDFRKDFQFYKVREINNYHHAHDAYLNAVVGTALIKKYPKLESEFVYGDYKVYDVRK | |
| | MIAKSEQEIGKATAKYFFYSNIMNFFKTEITLANGEIRKRPLIETNGETGEIVWDKGRDFATVRKVLS | |
| | MPQVNIVKKTEVQTGGFSKESILPKRNSDKLIARKKDWDPKKYGGFDSPTVAYSVLVVAKVEKGKSKK | |
| | LKSVKELLGITIMERSSFEKNPIDFLEAKGYKEVKKDLIIKLPKYSLFELENGRKRMLASAGELQKGN | |
| | ELALPSKYVNFLYLASHYEKLKGSPEDNEQKQLFVEQHKHYLDEIIEQISEFSKRVILADANLDKVLS | |
| | AYNKHRDKPIREQAENIIHLFTLTNLGAPAAFKYFDTTIDRKRYTSTKEVLDATLIHQSITGLYETRI | |
| | DLSQLGGD | |
| Cas9 nickase | MDKKYSIGLDIGTNSVGWAVITDEYKVPSKKFKVLGNTDRHSIKKNLIGALLFDSGETAEATRLKRTA | 4 0 |
| Streptococcus | RRRYTRRKNRICYLQEIFSNEMAKVDDSFFHRLEESFLVEEDKKHERHPIFGNIVDEVAYHEKYPTIY | |
| pyogenes | HLRKKLVDSTDKADLRLIYLALAHMIKFRGHFLIEGDLNPDNSDVDKLFIQLVQTYNQLFEENPINAS | |
| Q99ZW2 Cas9 | GVDAKAILSARLSKSRRLENLIAQLPGEKKNGLFGNLIALSLGLTPNFKSNFDLAEDAKLQLSKDTYD | |
| with R863A, | DDLDNLLAQIGDQYADLFLAAKNLSDAILLSDILRVNTEITKAPLSASMIKRYDEHHQDLTLLKALVR | |
| wherein X is | QQLPEKYKEIFFDQSKNGYAGYIDGGASQEEFYKFIKPILEKMDGTEELLVKLNREDLLRKQRTFDNG | |
| any alternate | SIPHQIHLGELHAILRRQEDFYPFLKDNREKIEKILTFRIPYYVGPLARGNSRFAWMTRKSEETITPW | |
| amino acid | NFEEVVDKGASAQSFIERMTNFDKNLPNEKVLPKHSLLYEYFTVYNELTKVKYVTEGMRKPAFLSGEQ | |
| | KKAIVDLLFKTNRKVTVKQLKEDYFKKIECFDSVEISGVEDRFNASLGTYHDLLKIIKDKDFLDNEEN | |
| | EDILEDIVLTLTLFEDREMIEERLKTYAHLFDDKVMKQLKRRRYTGWGRLSRKLINGIRDKQSGKTIL | |
| | DFLKSDGFANRNFMQLIHDDSLTFKEDIQKAQVSGQGDSLHEHIANLAGSPAIKKGILQTVKVVDELV | |
| | KVMGRHKPENIVIEMARENQTTQKGQKNSRERMKRIEEGIKELGSQILKEHPVENTQLQNEKLYLYYL | |
| | QNGRDMYVDQELDINRLSDYDVDHIVPQSFLKDDSIDNKVLTRSDKNAGKSDNVPSEEVVKKMKNYWR | |
| | QLLNAKLITQRKFDNLTKAERGGLSELDKAGFIKRQLVETRQITKHVAQILDSRMNTKYDENDKLIRE | |
| | VKVITLKSKLVSDFRKDFQFYKVREINNYHHAHDAYLNAVVGTALIKKYPKLESEFVYGDYKVYDVRK | |
| | MIAKSEQEIGKATAKYFFYSNIMNFFKTEITLANGEIRKRPLIETNGETGEIVWDKGRDFATVRKVLS | |
| | MPQVNIVKKTEVQTGGFSKESILPKRNSDKLIARKKDWDPKKYGGFDSPTVAYSVLVVAKVEKGKSKK | |
| | LKSVKELLGITIMERSSFEKNPIDFLEAKGYKEVKKDLIIKLPKYSLFELENGRKRMLASAGELQKGN | |
| | ELALPSKYVNFLYLASHYEKLKGSPEDNEQKQLFVEQHKHYLDEIIEQISEFSKRVILADANLDKVLS | |
| | AYNKHRDKPIREQAENIIHLFTLTNLGAPAAFKYFDTTIDRKRYTSTKEVLDATLIHQSITGLYETRI | |
| | DLSQLGGD | |
| Cas9 nickase | DKKYSIGLDIGTNSVGWAVITDEYKVPSKKFKVLGNTDRHSIKKNLIGALLFDSGETAEATRLKRTAR | 41 |
| (Met minus) | RRYTRRKNRICYLQEIFSNEMAKVDDSFFHRLEESFLVEEDKKHERHPIFGNIVDEVAYHEKYPTIYH | |
| Streptococcus | LRKKLVDSTDKADLRLIYLALAHMIKFRGHFLIEGDLNPDNSDVDKLFIQLVQTYNQLFEENPINASG | |
| pyogenes | VDAKAILSARLSKSRRLENLIAQLPGEKKNGLFGNLIALSLGLTPNFKSNFDLAEDAKLQLSKDTYDD | |
| Q99ZW2 Cas9 | DLDNLLAQIGDQYADLFLAAKNLSDAILLSDILRVNTEITKAPLSASMIKRYDEHHQDLTLLKALVRQ | |
| with H840X, | QLPEKYKEIFFDQSKNGYAGYIDGGASQEEFYKFIKPILEKMDGTEELLVKLNREDLLRKQRTFDNGS | |
| wherein X is | IPHQIHLGELHAILRRQEDFYPFLKDNREKIEKILTFRIPYYVGPLARGNSRFAWMTRKSEETITPWN | |
| any alternate | FEEVVDKGASAQSFIERMTNFDKNLPNEKVLPKHSLLYEYFTVYNELTKVKYVTEGMRKPAFLSGEQK | |
| amino acid | KAIVDLLFKTNRKVTVKQLKEDYFKKIECFDSVEISGVEDRFNASLGTYHDLLKIIKDKDFLDNEENE | |
| | DILEDIVLTLTLFEDREMIEERLKTYAHLFDDKVMKQLKRRRYTGWGRLSRKLINGIRDKQSGKTILD | |
| | FLKSDGFANRNFMQLIHDDSLTFKEDIQKAQVSGQGDSLHEHIANLAGSPAIKKGILQTVKVVDELVK | |
| | VMGRHKPENIVIEMARENQTTQKGQKNSRERMKRIEEGIKELGSQILKEHPVENTQLQNEKLYLYYLQ | |
| | NGRDMYVDQELDINRLSDYDVDXIVPQSFLKDDSIDNKVLTRSDKNRGKSDNVPSEEVVKKMKNYWRQ | |
| | LLNAKLITQRKFDNLTKAERGGLSELDKAGFIKRQLVETRQITKHVAQILDSRMNTKYDENDKLIREV | |
| | KVITLKSKLVSDFRKDFQFYKVREINNYHHAHDAYLNAVVGTALIKKYPKLESEFVYGDYKVYDVRKM | |
| | IAKSEQEIGKATAKYFFYSNIMNFFKTEITLANGEIRKRPLIETNGETGEIVWDKGRDFATVRKVLSM | |
| | PQVNIVKKTEVQTGGFSKESILPKRNSDKLIARKKDWDPKKYGGFDSPTVAYSVLVVAKVEKGKSKKL | |
| | KSVKELLGITIMERSSFEKNPIDFLEAKGYKEVKKDLIIKLPKYSLFELENGRKRMLASAGELQKGNE | |
| | LALPSKYVNFLYLASHYEKLKGSPEDNEQKQLFVEQHKHYLDEIIEQISEFSKRVILADANLDKVLSA | |
| | YNKHRDKPIREQAENIIHLFTLTNLGAPAAFKYFDTTIDRKRYTSTKEVLDATLIHQSITGLYETRID | |
| | LSQLGGD | |
| Cas9 nickase | DKKYSIGLDIGTNSVGWAVITDEYKVPSKKFKVLGNTDRHSIKKNLIGALLFDSGETAEATRLKRTAR | 42 |
| (Met minus) | RRYTRRKNRICYLQEIFSNEMAKVDDSFFHRLEESFLVEEDKKHERHPIFGNIVDEVAYHEKYPTIYH | |
| Streptococcus | LRKKLVDSTDKADLRLIYLALAHMIKFRGHFLIEGDLNPDNSDVDKLFIQLVQTYNQLFEENPINASG | |
| pyogenes | VDAKAILSARLSKSRRLENLIAQLPGEKKNGLFGNLIALSLGLTPNFKSNFDLAEDAKLQLSKDTYDD | |
| Q99ZW2 Cas9 | DLDNLLAQIGDQYADLFLAAKNLSDAILLSDILRVNTEITKAPLSASMIKRYDEHHQDLTLLKALVRQ | |
| with H840A, | QLPEKYKEIFFDQSKNGYAGYIDGGASQEEFYKFIKPILEKMDGTEELLVKLNREDLLRKQRTFDNGS | |
| wherein X is | IPHQIHLGELHAILRRQEDFYPFLKDNREKIEKILTFRIPYYVGPLARGNSRFAWMTRKSEETITPWN | |
| any alternate | FEEVVDKGASAQSFIERMTNFDKNLPNEKVLPKHSLLYEYFTVYNELTKVKYVTEGMRKPAFLSGEQK | |
| amino acid | KAIVDLLFKTNRKVTVKQLKEDYFKKIECFDSVEISGVEDRFNASLGTYHDLLKIIKDKDFLDNEENE | |
| | DILEDIVLTLTLFEDREMIEERLKTYAHLFDDKVMKQLKRRRYTGWGRLSRKLINGIRDKQSGKTILD | |
| | FLKSDGFANRNFMQLIHDDSLTFKEDIQKAQVSGQGDSLHEHIANLAGSPAIKKGILQTVKVVDELVK | |
| | VMGRHKPENIVIEMARENQTTQKGQKNSRERMKRIEEGIKELGSQILKEHPVENTQLQNEKLYLYYLQ | |
| | NGRDMYVDQELDINRLSDYDVDAIVPQSFLKDDSIDNKVLTRSDKNRGKSDNVPSEEVVKKMKNYWRQ | |
| | LLNAKLITQRKFDNLTKAERGGLSELDKAGFIKRQLVETRQITKHVAQILDSRMNTKYDENDKLIREV | |
| | KVITLKSKLVSDFRKDFQFYKVREINNYHHAHDAYLNAVVGTALIKKYPKLESEFVYGDYKVYDVRKM | |
| | IAKSEQEIGKATAKYFFYSNIMNFFKTEITLANGEIRKRPLIETNGETGEIVWDKGRDFATVRKVLSM | |
| | PQVNIVKKTEVQTGGFSKESILPKRNSDKLIARKKDWDPKKYGGFDSPTVAYSVLVVAKVEKGKSKKL | |
| | KSVKELLGITIMERSSFEKNPIDFLEAKGYKEVKKDLIIKLPKYSLFELENGRKRMLASAGELQKGNE | |
| | LALPSKYVNFLYLASHYEKLKGSPEDNEQKQLFVEQHKHYLDEIIEQISEFSKRVILADANLDKVLSA | |
| | YNKHRDKPIREQAENIIHLFTLTNLGAPAAFKYFDTTIDRKRYTSTKEVLDATLIHQSITGLYETRID | |
| | LSQLGGD | |
| Cas9 nickase | DKKYSIGLDIGTNSVGWAVITDEYKVPSKKFKVLGNTDRHSIKKNLIGALLFDSGETAEATRLKRTAR | 43 |
| (Met minus) | RRYTRRKNRICYLQEIFSNEMAKVDDSFFHRLEESFLVEEDKKHERHPIFGNIVDEVAYHEKYPTIYH | |
| Streptococcus | LRKKLVDSTDKADLRLIYLALAHMIKFRGHFLIEGDLNPDNSDVDKLFIQLVQTYNQLFEENPINASG | |
| pyogenes | VDAKAILSARLSKSRRLENLIAQLPGEKKNGLFGNLIALSLGLTPNFKSNFDLAEDAKLQLSKDTYDD | |
| Q99ZW2 Cas9 | DLDNLLAQIGDQYADLFLAAKNLSDAILLSDILRVNTEITKAPLSASMIKRYDEHHQDLTLLKALVRQ | |
| with R863X, | QLPEKYKEIFFDQSKNGYAGYIDGGASQEEFYKFIKPILEKMDGTEELLVKLNREDLLRKQRTFDNGS | |
| wherein X is | IPHQIHLGELHAILRRQEDFYPFLKDNREKIEKILTFRIPYYVGPLARGNSRFAWMTRKSEETITPWN | |
| any alternate | FEEVVDKGASAQSFIERMTNFDKNLPNEKVLPKHSLLYEYFTVYNELTKVKYVTEGMRKPAFLSGEQK | |
| amino acid | KAIVDLLFKTNRKVTVKQLKEDYFKKIECFDSVEISGVEDRFNASLGTYHDLLKIIKDKDFLDNEENE | |
| | DILEDIVLTLTLFEDREMIEERLKTYAHLFDDKVMKQLKRRRYTGWGRLSRKLINGIRDKQSGKTILD | |
| | FLKSDGFANRNFMQLIHDDSLTFKEDIQKAQVSGQGDSLHEHIANLAGSPAIKKGILQTVKVVDELVK | |
| | VMGRHKPENIVIEMARENQTTQKGQKNSRERMKRIEEGIKELGSQILKEHPVENTQLQNEKLYLYYLQ | |
| | NGRDMYVDQELDINRLSDYDVDHIVPQSFLKDDSIDNKVLTRSDKNXGKSDNVPSEEVVKKMKNYWRQ | |
| | LLNAKLITQRKFDNLTKAERGGLSELDKAGFIKRQLVETRQITKHVAQILDSRMNTKYDENDKLIREV | |
| | KVITLKSKLVSDFRKDFQFYKVREINNYHHAHDAYLNAVVGTALIKKYPKLESEFVYGDYKVYDVRKM | |
| | IAKSEQEIGKATAKYFFYSNIMNFFKTEITLANGEIRKRPLIETNGETGEIVWDKGRDFATVRKVLSM | |
| | PQVNIVKKTEVQTGGFSKESILPKRNSDKLIARKKDWDPKKYGGFDSPTVAYSVLVVAKVEKGKSKKL | |
| | KSVKELLGITIMERSSFEKNPIDFLEAKGYKEVKKDLIIKLPKYSLFELENGRKRMLASAGELQKGNE | |
| | LALPSKYVNFLYLASHYEKLKGSPEDNEQKQLFVEQHKHYLDEIIEQISEFSKRVILADANLDKVLSA | |
| | YNKHRDKPIREQAENIIHLFTLTNLGAPAAFKYFDTTIDRKRYTSTKEVLDATLIHQSITGLYETRID | |
| | LSQLGGD | |
| Cas9 nickase | DKKYSIGLDIGTNSVGWAVITDEYKVPSKKFKVLGNTDRHSIKKNLIGALLFDSGETAEATRLKRTAR | 44 |
| (Met minus) | RRYTRRKNRICYLQEIFSNEMAKVDDSFFHRLEESFLVEEDKKHERHPIFGNIVDEVAYHEKYPTIYH | |
| Streptococcus | LRKKLVDSTDKADLRLIYLALAHMIKFRGHFLIEGDLNPDNSDVDKLFIQLVQTYNQLFEENPINASG | |
| pyogenes | VDAKAILSARLSKSRRLENLIAQLPGEKKNGLFGNLIALSLGLTPNFKSNFDLAEDAKLQLSKDTYDD | |
| Q99ZW2 Cas9 | DLDNLLAQIGDQYADLFLAAKNLSDAILLSDILRVNTEITKAPLSASMIKRYDEHHQDLTLLKALVRQ | |
| with R863A, | QLPEKYKEIFFDQSKNGYAGYIDGGASQEEFYKFIKPILEKMDGTEELLVKLNREDLLRKQRTFDNGS | |
| wherein X is | IPHQIHLGELHAILRRQEDFYPFLKDNREKIEKILTFRIPYYVGPLARGNSRFAWMTRKSEETITPWN | |
| any alternate | FEEVVDKGASAQSFIERMTNFDKNLPNEKVLPKHSLLYEYFTVYNELTKVKYVTEGMRKPAFLSGEQK | |
| amino acid | KAIVDLLFKTNRKVTVKQLKEDYFKKIECFDSVEISGVEDRFNASLGTYHDLLKIIKDKDFLDNEENE | |
| | DILEDIVLTLTLFEDREMIEERLKTYAHLFDDKVMKQLKRRRYTGWGRLSRKLINGIRDKQSGKTILD | |
| | FLKSDGFANRNFMQLIHDDSLTFKEDIQKAQVSGQGDSLHEHIANLAGSPAIKKGILQTVKVVDELVK | |
| | VMGRHKPENIVIEMARENQTTQKGQKNSRERMKRIEEGIKELGSQILKEHPVENTQLQNEKLYLYYLQ | |
| | NGRDMYVDQELDINRLSDYDVDHIVPQSFLKDDSIDNKVLTRSDKNAGKSDNVPSEEVVKKMKNYWRQ | |
| | LLNAKLITQRKFDNLTKAERGGLSELDKAGFIKRQLVETRQITKHVAQILDSRMNTKYDENDKLIREV | |
| | KVITLKSKLVSDFRKDFQFYKVREINNYHHAHDAYLNAVVGTALIKKYPKLESEFVYGDYKVYDVRKM | |
| | IAKSEQEIGKATAKYFFYSNIMNFFKTEITLANGEIRKRPLIETNGETGEIVWDKGRDFATVRKVLSM | |
| | PQVNIVKKTEVQTGGFSKESILPKRNSDKLIARKKDWDPKKYGGFDSPTVAYSVLVVAKVEKGKSKKL | |
| | KSVKELLGITIMERSSFEKNPIDFLEAKGYKEVKKDLIIKLPKYSLFELENGRKRMLASAGELQKGNE | |
| | LALPSKYVNFLYLASHYEKLKGSPEDNEQKQLFVEQHKHYLDEIIEQISEFSKRVILADANLDKVLSA | |
| | YNKHRDKPIREQAENIIHLFTLTNLGAPAAFKYFDTTIDRKRYTSTKEVLDATLIHQSITGLYETRID | |
| | LSQLGGD | |

Small-sized Cas9 variants

| | | |
|---|---|---|
| SaCas9 | MGKRNYILGLDIGITSVGYGIIDYETRDVIDAGVRLFKEANVENNEGRRSKRGARRLKRRRRHRIQRV | 45 |
| Staphylococcus | KKLLFDYNLLTDHSELSGINPYEARVKGLSQKLSEEEFSAALLHLAKRRGVHNVNEVEEDTGNELSTK | |
| aureus | EQISRNSKALEEKYVAELQLERLKKDGEVRGSINRFKTSDYVKEAKQLLKVQKAYHQLDQSFIDTYID | |
| 1053 AA | LLETRRTYYEGPGEGSPFGWKDIKEWYEMLMGHCTYFPEELRSVKYAYNADLYNALNDLNNLVITRDE | |
| 123 kDa | NEKLEYYEKFQIIENVFKQKKKPTLKQIAKEILVNEEDIKGYRVTSTGKPEFTNLKVYHDIKDITARK | |
| | EIIENAELLDQIAKILTIYQSSEDIQEELTNLNSELTQEEIEQISNLKGYTGTHNLSLKAINLILDEL | |
| | WHTNDNQIAIFNRLKLVPKKVDLSQQKEIPTTLVDDFILSPVVKRSFIQSIKVINAIIKKYGLPNDII | |
| | IELAREKNSKDAQKMINEMQKRNRQTNERIEEIIRTTGKENAKYLIEKIKLHDMQEGKCLYSLEAIPL | |
| | EDLLNNPFNYEVDHIIPRSVSFDNSFNNKVLVKQEENSKKGNRTPFQYLSSSDSKISYETFKKHILNL | |
| | AKGKGRISKTKKEYLLEERDINRFSVQKDFINRNLVDTRYATRGLMNLLRSYFRVNNLDVKVKSINGG | |
| | FTSFLRRKWKFKKERNKGYKHHAEDALIIANADFIFKEWKKLDKAKKVMENQMFEEKQAESMPEIETE | |
| | QEYKEIFITPHQIKHIKDFKDYKYSHRVDKKPNRKLINDTLYSTRKDDKGNTLIVNNLNGLYDKDNDK | |
| | LKKLINKSPEKLLMYHHDPQTYQKLKLIMEQYGDEKNPLYKYYEETGNYLTKYSKKDNGPVIKKIKYY | |
| | GNKLNAHLDITDDYPNSRNKVVKLSLKPYRFDVYLDNGVYKFVTVKNLDVIKKENYYEVNSKCYEEAK | |
| | KLKKISNQAEFIASFYKNDLIKINGELYRVIGVNNDLLNRIEVNMIDITYREYLENMNDKRPPHIIKT | |
| | IASKTQSIKKYSTDILGNLYEVKSKKHPQIIKK | |
| NmeCas 9 | MAAFKPNSINYILGLDIGIASVGWAMVEIDEEENPIRLIDLGVRVFERAEVPKTGDSLAMARRLARSV | 46 |
| N. | RRLTRRRAHRLLRTRRLLKREGVLQAANFDENGLIKSLPNTPWQLRAAALDRKLTPLEWSAVLLHLIK | |
| meningitidis | HRGYLSQRKNEGETADKELGALLKGVAGNAHALQTGDFRTPAELALNKFEKESGHIRNQRSDYSHTFS | |
| 1083 AA | RKDLQAELILLFEKQKEFGNPHVSGGLKEGIETLLMTQRPALSGDAVQKMLGHCTFEPAEPKAAKNTY | |
| 124.5 kDa | TAERFIWLTKLNNLRILEQGSERPLTDTERATLMDEPYRKSKLTYAQARKLLGLEDTAFFKGLRYGKD | |
| | NAEASTLMEMKAYHAISRALEKEGLKDKKSPLNLSPELQDEIGTAFSLFKTDEDITGRLKDRIQPEIL | |
| | EALLKHISFDKFVQISLKALRRIVPLMEQGKRYDEACAEIYGDHYGKKNTEEKIYLPPIPADEIRNPV | |
| | VLRALSQARKVINGVVRRYGSPARIHIETAREVGKSFKDRKEIEKRQEENRKDREKAAAKFREYFPNF | |
| | VGEPKSKDILKLRLYEQQHGKCLYSGKEINLGRLNEKGYVEIDAALPFSRTWDDSFNNKVLVLGSENQ | |
| | NKGNQTPYEYFNGKDNSREWQEFKARVETSRFPRSKKQRILLQKFDEDGFKERNLNDTRYVNRFLCQF | |
| | VADRMRLTGKGKKRVFASNGQITNLLRGFWGLRKVRAENDRHHALDAVVVACSTVAMQQKITRFVRYK | |
| | EMNAFDGKTIDKETGEVLHQKTHFPQPWEFFAQEVMIRVFGKPDGKPEFEEADTLEKLRTLLAEKLSS | |
| | RPEAVHEYVTPLFVSRAPNRKMSGQGHMETVKSAKRLDEGVSVLRVPLTQLKLKDLEKMVNREREPKL | |
| | YEALKARLEAHKDDPAKAFAEPFYKYDKAGNRTQQVKAVRVEQVQKTGVWVRNHNGIADNATMVRVDV | |
| | FEKGDKYYLVPIYSWQVAKGILPDRAVVQGKDEEDWQLIDDSFNFKFSLHPNDLVEVITKKARMFGYF | |
| | ASCHRGTGNINIRIHDLDHKIGKNGILEGIGVKTALSFQKYQIDELGKEIRPCRLKKRPPVR | |
| CjCas9 | MARILAFDIGISSIGWAFSENDELKDCGVRIFTKVENPKTGESLALPRRLARSARKRLARRKARLNHL | 47 |
| C. jejuni | KHLIANEFKLNYEDYQSFDESLAKAYKGSLISPYELRFRALNELLSKQDFARVILHIAKRRGYDDIKN | |
| 984 AA | SDDKEKGAILKAIKQNEEKLANYQSVGEYLYKEYFQKFKENSKEFTNVRNKKESYERCIAQSFLKDEL | |
| 114.9 kDa | KLIFKKQREFGFSFSKKFEEEVLSVAFYKRALKDFSHLVGNCSFFTDEKRAPKNSPLAFMFVALTRII | |
| | NLLNNLKNTEGILYTKDDLNALLNEVLKNGTLTYKQTKKLLGLSDDYEFKGEKGTYFIEFKKYKEFIK | |
| | ALGEHNLSQDDLNEIAKDITLIKDEIKLKKALAKYDLNQNQIDSLSKLEFKDHLNISFKALKLVTPLM | |
| | LEGKKYDEACNELNLKVAINEDKKDFLPAFNETYYKDEVTNPVVLRAIKEYRKVLNALLKKYGKVHKI | |
| | NIELAREVGKNHSQRAKIEKEQNENYKAKKDAELECEKLGLKINSKNILKLRLFKEQKEFCAYSGEKI | |
| | KISDLQDEKMLEIDHIYPYSRSFDDSYMNKVLVFTKQNQEKLNQTPFEAFGNDSAKWQKIEVLAKNLP | |
| | TKKQKRILDKNYKDKEQKNFKDRNLNDTRYIARLVLNYTKDYLDFLPLSDDENTKLNDTQKGSKVHVE | |
| | AKSGMLTSALRHTWGFSAKDRNNHLHHAIDAVIIAYANNSIVKAFSDFKKEQESNSAELYAKKISELD | |
| | YKNKRKFFEPFSGFRQKVLDKIDEIFVSKPERKKPSGALHEETFRKEEEFYQSYGGKEGVLKALELGK | |
| | IRKVNGKIVKNGDMFRVDIFKHKKTNKFYAVPIYTMDFALKVLPNKAVARSKKGEIKDWILMDENYEF | |
| | CFSLYKDSLILIQTKDMQEPEFVYYNAFTSSTVSLIVSKHDNKFETLSKNQKILFKNANEKEVIAKSI | |
| | GIQNLKVFEKYIVSALGEVTKAEFRQREDFKK | |
| GeoCas 9 | MRYKIGLDIGITSVGWAVMNLDIPRIEDLGVRIFDRAENPQTGESLALPRRLARSARRRLRRRKHRLE | 48 |
| G. | RIRRLVIREGILTKEELDKLFEEKHEIDVWQLRVEALDRKLNNDELARVLLHLAKRRGFKSNRKSERS | |
| stearo- | NKENSTMLKHIEENRAILSSYRTVGEMIVKDPKFALHKRNKGENYTNTIARDDLEREIRLIFSKQREF | |
| thermophilus | GNMSCTEEFENEYITIWASQRPVASKDDIEKKVGFCTFEPKEKRAPKATYTFQSFIAWEHINKLRLIS | |
| 1087 AA | PSGARGLTDEERRLLYEQAFQKNKITYHDIRTLLHLPDDTYFKGIVYDRGESRKQNENIRFLELDAYH | |
| 127 kDa | QIRKAVDKVYGKGKSSSFLPIDFDTFGYALTLFKDDADIHSYLRNEYEQNGKRMPNLANKVYDNELIE | |
| | ELLNLSFTKFGHLSLKALRSILPYMEQGEVYSSACERAGYTFTGPKKKQKTMLLPNIPPIANPVVMRA | |
| | LTQARKVVNAIIKKYGSPVSIHIELARDLSQTFDERRKTKKEQDENRKKNETAIRQLMEYGLTLNPTG | |
| | HDIVKFKLWSEQNGRCAYSLQPIEIERLLEPGYVEVDHVIPYSRSLDDSYTNKVLVLTRENREKGNRI | |
| | PAEYLGVGTERWQQFETFVLTNKQFSKKKRDRLLRLHYDENEETEFKNRNLNDTRYISRFFANFIREH | |
| | LKFAESDDKQKVYTVNGRVTAHLRSRWEFNKNREESDLHHAVDAVIVACTTPSDIAKVTAFYQRREQN | |
| | KELAKKTEPHFPQPWPHFADELRARLSKHPKESIKALNLGNYDDQKLESLQPVFVSRMPKRSVTGAAH | |
| | QETLRRYVGIDERSGKIQTVVKTKLSEIKLDASGHFPMYGKESDPRTYEAIRQRLLEHNNDPKKAFQE | |
| | PLYKPKKNGEPGPVIRTVKIIDTKNQVIPLNDGKTVAYNSNIVRVDVFEKDGKYYCVPVYTMDIMKGI | |
| | LPNKAIEPNKPYSEWKEMTEDYTFRFSLYPNDLIRIELPREKTVKTAAGEEINVKDVFVYYKTIDSAN | |
| | GGLELISHDHRFSLRGVGSRTLKRFEKYQVDVLGNIYKVRGEKRVGLASSAHSKPGKTIRPLQSTRD | |
| LbaCas12a | MSKLEKFTNCYSLSKTLRFKAIPVGKTQENIDNKRLLVEDEKRAEDYKGVKKLLDRYYLSFINDVLHS | 49 |
| L. bacterium | IKLKNLNNYISLFRKKTRTEKENKELENLEINLRKEIAKAFKGNEGYKSLFKKDIIETILPEFLDDKD | |
| 1228 AA | EIALVNSFNGFTTAFTGFFDNRENMFSEEAKSTSIAFRCINENLTRYISNMDIFEKVDAIFDKHEVQE | |
| 143.9 kDa | IKEKILNSDYDVEDFFEGEFFNFVLTQEGIDVYNAIIGGFVTESGEKIKGLNEYINLYNQKTKQKLPK | |
| | FKPLYKQVLSDRESLSFYGEGYTSDEEVLEVFRNTLNKNSEIFSSIKKLEKLFKNFDEYSSAGIFVKN | |
| | GPAISTISKDIFGEWNVIRDKWNAEYDDIHLKKKAVVTEKYEDDRRKSFKKIGSFSLEQLQEYADADL | |
| | SVVEKLKEIIIQKVDEIYKVYGSSEKLFDADFVLEKSLKKNDAVVAIMKDLLDSVKSFENYIKAFFGE | |
| | GKETNRDESFYGDFVLAYDILLKVDHIYDAIRNYVTQKPYSKDKFKLYFQNPQFMGGWDKDKETDYRA | |
| | TILRYGSKYYLAIMDKKYAKCLQKIDKDDVNGNYEKINYKLLPGPNKMLPKVFFSKKWMAYYNPSEDI | |
| | QKIYKNGTFKKGDMFNLNDCHKLIDFFKDSISRYPKWSNAYDFNFSETEKYKDIAGFYREVEEQGYKV | |
| | SFESASKKEVDKLVEEGKLYMFQIYNKDFSDKSHGTPNLHTMYFKLLFDENNHGQIRLSGGAELFMRR | |
| | ASLKKEELVVHPANSPIANKNPDNPKKTTTLSYDVYKDKRFSEDQYELHIPIAINKCPKNIFKINTEV | |
| | RVLLKHDDNPYVIGIDRGERNLLYIVVVDGKGNIVEQYSLNEIINNFNGIRIKTDYHSLLDKKEKERF | |
| | EARQNWTSIENIKELKAGYISQVVHKICELVEKYDAVIALEDLNSGFKNSRVKVEKQVYQKFEKMLID | |
| | KLNYMVDKKSNPCATGGALKGYQITNKFESFKSMSTQNGFIFYIPAWLTSKIDPSTGFVNLLKTKYTS | |
| | IADSKKFISSFDRIMYVPEEDLFEFALDYKNFSRTDADYIKKWKLYSYGNRIRIFRNPKKNNVFDWEE | |
| | VCLTSAYKELFNKYGINYQQGDIRALLCEQSDKAFYSSFMALMSLMLQMRNSITGRTDVDFLISPVKN | |
| | SDGIFYDSRNYEAQENAILPKNADANGAYNIARKVLWAIGQFKKAEDEKLDKVKIAISNKEWLEYAQT | |
| | SVKH | |
| BhCas12b | MATRSFILKIEPNEEVKKGLWKTHEVLNHGIAYYMNILKLIRQEAIYEHHEQDPKNPKKVSKAEIQAE | 50 |
| B. hisashii | LWDFVLKMQKCNSFTHEVDKDEVFNILRELYEELVPSSVEKKGEANQLSNKFLYPLVDPNSQSGKGTA | |
| 1108 AA | SSGRKPRWYNLKIAGDPSWEEEKKKWEEDKKKDPLAKILGKLAEYGLIPLFIPYTDSNEPIVKEIKWM | |
| 130.4 kDa | EKSRNQSVRRLDKDMFIQALERFLSWESWNLKVKEEYEKVEKEYKTLEERIKEDIQALKALEQYEKER | |
| | QEQLLRDTLNTNEYRLSKRGLRGWREIIQKWLKMDENEPSEKYLEVFKDYQRKHPREAGDYSVYEFLS | |
| | KKENHFIWRNHPEYPYLYATFCEIDKKKKDAKQQATFTLADPINHPLWVRFEERSGSNLNKYRILTEQ | |
| | LHTEKLKKKLTVQLDRLIYPTESGGWEEKGKVDIVLLPSRQFYNQIFLDIEEKGKHAFTYKDESIKFP | |
| | LKGTLGGARVQFDRDHLRRYPHKVESGNVGRIYFNMTVNIEPTESPVSKSLKIHRDDFPKVVNFKPKE | |
| | LTEWIKDSKGKKLKSGIESLEIGLRVMSIDLGQRQAAAASIFEVVDQKPDIEGKLFFPIKGTELYAVH | |
| | RASFNIKLPGETLVKSREVLRKAREDNLKLMNQKLNFLRNVLHFQQFEDITEREKRVTKWISRQENSD | |
| | VPLVYQDELIQIRELMYKPYKDWVAFLKQLHKRLEVEIGKEVKHWRKSLSDGRKGLYGISLKNIDEID | |
| | RTRKFLLRWSLRPTEPGEVRRLEPGQRFAIDQLNHLNALKEDRLKKMANTIIMHALGYCYDVRKKKWQ | |
| | AKNPACQIILFEDLSNYNPYEERSRFENSKLMKWSRREIPRQVALQGEIYGLQVGEVGAQFSSRFHAK | |
| | TGSPGIRCSVVTKEKLQDNRFFKNLQREGRLTLDKIAVLKEGDLYPDKGGEKFISLSKDRKCVTTHAD | |
| | INAAQNLQKRFWTRTHGFYKVYCKAYQVDGQTVYIPESKDQKQKIIEEFGEGYFILKDGVYEWVNAGK | |
| | LKIKKGSSKQSSSELVDSDILKDSFDLASELKGEKLMLYRDPSGNVFPSDKWMAAGVFFGKLERILIS | |
| | KLTNQYSISTIEDDSSKQSM | |

Cas9 equivalents

| | | |
|---|---|---|
| AsCas12a | MTQFEGFTNLYQVSKTLRFELIPQGKTLKHIQEQGFIEEDKARNDHYKELKPIIDRIYKTYADQCLQL | 51 |
| (previously | VQLDWENLSAAIDSYRKEKTEETRNALIEEQATYRNAIHDYFIGRTDNLTDAINKRHAEIYKGLFKAE | |
| known as Cpf1) | LFNGKVLKQLGTVTTTEHENALLRSFDKFTTYFSGFYENRKNVFSAEDISTAIPHRIVQDNFPKFKEN | |
| Acidaminococcus | CHIFTRLITAVPSLREHFENVKKAIGIFVSTSIEEVFSFPFYNQLLTQTQIDLYNQLLGGISREAGTE | |
| sp. (strain | KIKGLNEVLNLAIQKNDETAHIIASLPHRFIPLFKQILSDRNTLSFILEEFKSDEEVIQSFCKYKTLL | |
| BV3L6) | RNENVLETAEALFNELNSIDLTHIFISHKKLETISSALCDHWDTLRNALYERRISELTGKITKSAKEK | |
| UniProtKB | VQRSLKHEDINLQEIISAAGKELSEAFKQKTSEILSHAHAALDQPLPTTLKKQEEKEILKSQLDSLLG | |
| U2UMQ6 | LYHLLDWFAVDESNEVDPEFSARLTGIKLEMEPSLSFYNKARNYATKKPYSVEKFKLNFQMPTLASGW | |
| | DVNKEKNNGAILFVKNGLYYLGIMPKQKGRYKALSFEPTEKTSEGFDKMYYDYFPDAAKMIPKCSTQL | |
| | KAVTAHFQTHTTPILLSNNFIEPLEITKEIYDLNNPEKEPKKFQTAYAKKTGDQKGYREALCKWIDFT | |
| | RDFLSKYTKTTSIDLSSLRPSSQYKDLGEYYAELNPLLYHISFQRIAEKEIMDAVETGKLYLFQIYNK | |
| | DFAKGHHGKPNLHTLYWTGLFSPENLAKTSIKLNGQAELFYRPKSRMKRMAHRLGEKMLNKKLKDQKT | |
| | PIPDTLYQELYDYVNHRLSHDLSDEARALLPNVITKEVSHEIIKDRRFTSDKFFFHVPITLNYQAANS | |
| | PSKFNQRVNAYLKEHPETPIIGIDRGERNLIYITVIDSTGKILEQRSLNTIQQFDYQKKLDNREKERV | |
| | AARQAWSVVGTIKDLKQGYLSQVIHEIVDLMIHYQAVVVLENLNFGFKSKRTGIAEKAVYQQFEKMLI | |
| | DKLNCLVLKDYPAEKVGGVLNPYQLTDQFTSFAKMGTQSGFLFYVPAPYTSKIDPLTGFVDPFVWKTI | |
| | KNHESRKHFLEGFDFLHYDVKTGDFILHFKMNRNLSFQRGLPGFMPAWDIVFEKNETQFDAKGTPFIA | |
| | GKRIVPVIENHRFTGRYRDLYPANELIALLEEKGIVFRDGSNILPKLLENDDSHAIDTMVALIRSVLQ | |
| | MRNSNAATGEDYINSPVRDLNGVCFDSRFQNPEWPMDADANGAYHIALKGQLLLNHLKESKDLKLQNG | |
| | ISNQDWLAYIQELRN | |
| AsCas12a | MTQFEGFTNLYQVSKTLRFELIPQGKTLKHIQEQGFIEEDKARNDHYKELKPIIDRIYKTYADQCLQL | 52 |
| nickase (e.g., | VQLDWENLSAAIDSYRKEKTEETRNALIEEQATYRNAIHDYFIGRTDNLTDAINKRHAEIYKGLFKAE | |
| R1226A) | LFNGKVLKQLGTVTTTEHENALLRSFDKFTTYFSGFYENRKNVFSAEDISTAIPHRIVQDNFPKFKEN | |
| | CHIFTRLITAVPSLREHFENVKKAIGIFVSTSIEEVFSFPFYNQLLTQTQIDLYNQLLGGISREAGTE | |
| | KIKGLNEVLNLAIQKNDETAHIIASLPHRFIPLFKQILSDRNTLSFILEEFKSDEEVIQSFCKYKTLL | |
| | RNENVLETAEALFNELNSIDLTHIFISHKKLETISSALCDHWDTLRNALYERRISELTGKITKSAKEK | |
| | VQRSLKHEDINLQEIISAAGKELSEAFKQKTSEILSHAHAALDQPLPTTLKKQEEKEILKSQLDSLLG | |
| | LYHLLDWFAVDESNEVDPEFSARLTGIKLEMEPSLSFYNKARNYATKKPYSVEKFKLNFQMPTLASGW | |
| | DVNKEKNNGAILFVKNGLYYLGIMPKQKGRYKALSFEPTEKTSEGFDKMYYDYFPDAAKMIPKCSTQL | |
| | KAVTAHFQTHTTPILLSNNFIEPLEITKEIYDLNNPEKEPKKFQTAYAKKTGDQKGYREALCKWIDFT | |
| | RDFLSKYTKTTSIDLSSLRPSSQYKDLGEYYAELNPLLYHISFQRIAEKEIMDAVETGKLYLFQIYNK | |
| | DFAKGHHGKPNLHTLYWTGLFSPENLAKTSIKLNGQAELFYRPKSRMKRMAHRLGEKMLNKKLKDQKT | |
| | PIPDTLYQELYDYVNHRLSHDLSDEARALLPNVITKEVSHEIIKDRRFTSDKFFFHVPITLNYQAANS | |
| | PSKFNQRVNAYLKEHPETPIIGIDRGERNLIYITVIDSTGKILEQRSLNTIQQFDYQKKLDNREKERV | |
| | AARQAWSVVGTIKDLKQGYLSQVIHEIVDLMIHYQAVVVLENLNFGFKSKRTGIAEKAVYQQFEKMLI | |
| | DKLNCLVLKDYPAEKVGGVLNPYQLTDQFTSFAKMGTQSGFLFYVPAPYTSKIDPLTGFVDPFVWKTI | |
| | KNHESRKHFLEGFDFLHYDVKTGDFILHFKMNRNLSFQRGLPGFMPAWDIVFEKNETQFDAKGTPFIA | |
| | GKRIVPVIENHRFTGRYRDLYPANELIALLEEKGIVFRDGSNILPKLLENDDSHAIDTMVALIRSVLQ | |
| | MANSNAATGEDYINSPVRDLNGVCFDSRFQNPEWPMDADANGAYHIALKGQLLLNHLKESKDLKLQNG | |
| | ISNQDWLAYIQELRN | |
| LbCas12a | MNYKTGLEDFIGKESLSKTLRNALIPTESTKIHMEEMGVIRDDELRAEKQQELKEIMDDYYRTFIEEK | 53 |
| (previously | LGQIQGIQWNSLFQKMEETMEDISVRKDLDKIQNEKRKEICCYFTSDKRFKDLFNAKLITDILPNFIK | |
| known as Cpf1) | DNKEYTEEEKAEKEQTRVLFQRFATAFTNYFNQRRNNFSEDNISTAISFRIVNENSEIHLQNMRAFQR | |
| Lachnospiraceae | IEQQYPEEVCGMEEEYKDMLQEWQMKHIYSVDFYDRELTQPGIEYYNGICGKINEHMNQFCQKNRINK | |
| bacterium | NDFRMKKLHKQILCKKSSYYEIPFRFESDQEVYDALNEFIKTMKKKEIIRRCVHLGQECDDYDLGKIY | |
| GAM79 | ISSNKYEQISNALYGSWDTIRKCIKEEYMDALPGKGEKKEEKAEAAAKKEEYRSIADIDKIISLYGSE | |
| Ref Seq. | MDRTISAKKCITEICDMAGQISIDPLVCNSDIKLLQNKEKTTEIKTILDSFLHVYQWGQTFIVSDIIE | |
| WP_119623382.1 | KDSYFYSELEDVLEDFEGITTLYNHVRSYVTQKPYSTVKFKLHFGSPTLANGWSQSKEYDNNAILLMR | |
| | DQKFYLGIFNVRNKPDKQIIKGHEKEEKGDYKKMIYNLLPGPSKMLPKVFITSRSGQETYKPSKHILD | |
| | GYNEKRHIKSSPKFDLGYCWDLIDYYKECIHKHPDWKNYDFHFSDTKDYEDISGFYREVEMQGYQIKW | |
| | TYISADEIQKLDEKGQIFLFQIYNKDFSVHSTGKDNLHTMYLKNLFSEENLKDIVLKLNGEAELFFRK | |
| | ASIKTPIVHKKGSVLVNRSYTQTVGNKEIRVSIPEEYYTEIYNYLNHIGKGKLSSEAQRYLDEGKIKS | |
| | FTATKDIVKNYRYCCDHYFLHLPITINFKAKSDVAVNERTLAYIAKKEDIHIIGIDRGERNLLYISVV | |
| | DVHGNIREQRSFNIVNGYDYQQKLKDREKSRDAARKNWEEIEKIKELKEGYLSMVIHYIAQLVVKYNA | |
| | VVAMEDLNYGFKTGRFKVERQVYQKFETMLIEKLHYLVFKDREVCEEGGVLRGYQLTYIPESLKKVGK | |
| | QCGFIFYVPAGYTSKIDPTTGFVNLFSFKNLTNRESRQDFVGKFDEIRYDRDKKMFEFSFDYNNYIKK | |
| | GTILASTKWKVYTNGTRLKRIVVNGKYTSQSMEVELTDAMEKMLQRAGIEYHDGKDLKGQIVEKGIEA | |
| | EIIDIFRLTVQMRNSRSESEDREYDRLISPVLNDKGEFFDTATADKTLPQDADANGAYCIALKGLYEV | |
| | KQIKENWKENEQFPRNKLVQDNKTWFDFMQKKRYL | |
| PcCas12a- | MAKNFEDFKRLYSLSKTLRFEAKPIGATLDNIVKSGLLDEDEHRAASYVKVKKLIDEYHKVFIDRVLD | 54 |
| previously | DGCLPLENKGNNNSLAEYYESYVSRAQDEDAKKKFKEIQQNLRSVIAKKLTEDKAYANLFGNKLIESY | |
| known at Cpf1 | KDKEDKKKIIDSDLIQFINTAESTQLDSMSQDEAKELVKEFWGFVTYFYGFFDNRKNMYTAEEKSTGI | |
| Prevotella | AYRLVNENLPKFIDNIEAFNRAITRPEIQENMGVLYSDFSEYLNVESIQEMFQLDYYNMLLTQKQIDV | |
| copri | YNAIIGGKTDDEHDVKIKGINEYINLYNQQHKDDKLPKLKALFKQILSDRNAISWLPEEFNSDQEVLN | |
| Ref Seq. | AIKDCYERLAENVLGDKVLKSLLGSLADYSLDGIFIRNDLQLTDISQKMFGNWGVIQNAIMQNIKRVA | |
| WP_119227726.1 | PARKHKESEEDYEKRIAGIFKKADSFSISYINDCLNEADPNNAYFVENYFATFGAVNTPTMQRENLFA | |
| | LVQNAYTEVAALLHSDYPTVKHLAQDKANVSKIKALLDAIKSLQHFVKPLLGKGDESDKDERFYGELA | |
| | SLWAELDTVTPLYNMIRNYMTRKPYSQKKIKLNFENPQLLGGWDANKEKDYATIILRRNGLYYLAIMD | |
| | KDSRKLLGKAMPSDGECYEKMVYKFFKDVTTMIPKCSTQLKDVQAYFKVNTDDYVLNSKAFNKPLTIT | |
| | KEVFDLNNVLYGKYKKFQKGYLTATGDNVGYTHAVNVWIKFCMDFLNSYDSTCIYDFSSLKPESYLSL | |
| | DAFYQDANLLLYKLSFARASVSYINQLVEEGKMYLFQIYNKDFSEYSKGTPNMHTLYWKALFDERNLA | |
| | DVVYKLNGQAEMFYRKKSIENTHPTHPANHPILNKNKDNKKKESLFDYDLIKDRRYTVDKFMFHVPIT | |
| | MNFKSVGSENINQDVKAYLRHADDMHIIGIDRGERHLLYLVVIDLQGNIKEQYSLNEIVNEYNGNTYH | |
| | TNYHDLLDVREEERLKARQSWQTIENIKELKEGYLSQVIHKITQLMVRYHAIVVLEDLSKGFMRSRQK | |
| | VEKQVYQKFEKMLIDKLNYLVDKKTDVSTPGGLLNAYQLTCKSDSSQKLGKQSGFLFYIPAWNTSKID | |
| | PVTGFVNLLDTHSLNSKEKIKAFFSKFDAIRYNKDKKWFEFNLDYDKFGKKAEDTRTKWTLCTRGMRI | |
| | DTFRNKEKNSQWDNQEVDLTTEMKSLLEHYYIDIHGNLKDAISAQTDKAFFTGLLHILKLTLQMRNSI | |
| | TGTETDYLVSPVADENGIFYDSRSCGNQLPENADANGAYNIARKGLMLIEQIKNAEDLNNVKFDISNK | |
| | AWLNFAQQKPYKNG | |
| ErCas12a- | MFSAKLISDILPEFVIHNNNYSASEKEEKTQVIKLFSRFATSFKDYFKNRANCFSANDISSSSCHRIV | 55 |
| previously | NDNAEIFFSNALVYRRIVKNLSNDDINKISGDMKDSLKEMSLEEIYSYEKYGEFITQEGISFYNDICG | |
| known at Cpf1 | KVNLFMNLYCQKNKENKNLYKLRKLHKQILCIADTSYEVPYKFESDEEVYQSVNGFLDNISSKHIVER | |
| Eubacterium | LRKIGENYNGYNLDKIYIVSKFYESVSQKTYRDWETINTALEIHYNNILPGNGKSKADKVKKAVKNDL | |
| rectale | QKSITEINELVSNYKLCPDDNIKAETYIHEISHILNNFEAQELKYNPEIHLVESELKASELKNVLDVI | |
| Ref Seq. | MNAFHWCSVFMTEELVDKDNNFYAELEEIYDEIYPVISLYNLVRNYVTQKPYSTKKIKLNFGIPTLAD | |
| WP_119223642.1 | GWSKSKEYSNNAIILMRDNLYYLGIFNAKNKPDKKIIEGNTSENKGDYKKMIYNLLPGPNKMIPKVFL | |
| | SSKTGVETYKPSAYILEGYKQNKHLKSSKDFDITFCHDLIDYFKNCIAIHPEWKNFGFDFSDTSTYED | |
| | ISGFYREVELQGYKIDWTYISEKDIDLLQEKGQLYLFQIYNKDFSKKSSGNDNLHTMYLKNLFSEENL | |
| | KDIVLKLNGEAEIFFRKSSIKNPIIHKKGSILVNRTYEAEEKDQFGNIQIVRKTIPENIYQELYKYFN | |
| | DKSDKELSDEAAKLKNVVGHHEAATNIVKDYRYTYDKYFLHMPITINFKANKTSFINDRILQYIAKEK | |
| | DLHVIGIDRGERNLIYVSVIDTCGNIVEQKSFNIVNGYDYQIKLKQQEGARQIARKEWKEIGKIKEIK | |
| | EGYLSLVIHEISKMVIKYNAIIAMEDLSYGFKKGRFKVERQVYQKFETMLINKLNYLVFKDISITENG | |
| | GLLKGYQLTYIPDKLKNVGHQCGCIFYVPAAYTSKIDPTTGFVNIFKFKDLTVDAKREFIKKFDSIRY | |
| | DSDKNLFCFTFDYNNFITQNTVMSKSSWSVYTYGVRIKRRFVNGRFSNESDTIDITKDMEKTLEMTDI | |
| | NWRDGHDLRQDIIDYEIVQHIFEIFKLTVQMRNSLSELEDRDYDRLISPVLNENNIFYDSAKAGDALP | |
| | KDADANGAYCIALKGLYEIKQITENWKEDGKFSRDKLKISNKDWFDFIQNKRYL | |
| CsCas12a- | MNYKTGLEDFIGKESLSKTLRNALIPTESTKIHMEEMGVIRDDELRAEKQQELKEIMDDYYRAFIEEK | 56 |
| previously | LGQIQGIQWNSLFQKMEETMEDISVRKDLDKIQNEKRKEICCYFTSDKRFKDLFNAKLITDILPNFIK | |
| known at Cpf1 | DNKEYTEEEKAEKEQTRVLFQRFATAFTNYFNQRRNNFSEDNISTAISFRIVNENSEIHLQNMRAFQR | |
| Clostridium | IEQQYPEEVCGMEEEYKDMLQEWQMKHIYLVDFYDRVLTQPGIEYYNGICGKINEHMNQFCQKNRINK | |
| sp. AF34-10BH | NDFRMKKLHKQILCKKSSYYEIPFRFESDQEVYDALNEFIKTMKEKEIICRCVHLGQKCDDYDLGKIY | |
| Ref Seq. | ISSNKYEQISNALYGSWDTIRKCIKEEYMDALPGKGEKKEEKAEAAAKKEEYRSIADIDKIISLYGSE | |
| WP_118538418.1 | MDRTISAKKCITEICDMAGQISTDPLVCNSDIKLLQNKEKTTEIKTILDSFLHVYQWGQTFIVSDIIE | |
| | KDSYFYSELEDVLEDFEGITTLYNHVRSYVTQKPYSTVKFKLHFGSPTLANGWSQSKEYDNNAILLMR | |
| | DQKFYLGIFNVRNKPDKQIIKGHEKEEKGDYKKMIYNLLPGPSKMLPKVFITSRSGQETYKPSKHILD | |
| | GYNEKRHIKSSPKFDLGYCWDLIDYYKECIHKHPDWKNYDFHFSDTKDYEDISGFYREVEMQGYQIKW | |
| | TYISADEIQKLDEKGQIFLFQIYNKDFSVHSTGKDNLHTMYLKNLFSEENLKDIVLKLNGEAELFFRK | |
| | ASIKTPVVHKKGSVLVNRSYTQTVGDKEIRVSIPEEYYTEIYNYLNHIGRGKLSTEAQRYLEERKIKS | |
| | FTATKDIVKNYRYCCDHYFLHLPITINFKAKSDIAVNERTLAYIAKKEDIHIIGIDRGERNLLYISVV | |
| | DVHGNIREQRSFNIVNGYDYQQKLKDREKSRDAARKNWEEIEKIKELKEGYLSMVIHYIAQLVVKYNA | |
| | VVAMEDLNYGFKTGRFKVERQVYQKFETMLIEKLHYLVFKDREVCEEGGVLRGYQLTYIPESLKKVGK | |
| | QCGFIFYVPAGYTSKIDPTTGFVNLFSFKNLTNRESRQDFVGKFDEIRYDRDKKMFEFSFDYNNYIKK | |
| | GTMLASTKWKVYTNGTRLKRIWNGKYTSQSMEVELTDAMEKMLQRAGIEYHDGKDLKGQIVEKGIEA | |
| | EIIDIFRLTVQMRNSRSESEDREYDRLISPVLNDKGEFFDTATADKTLPQDADANGAYCIALKGLYEV | |
| | KQIKENWKENEQFPRNKLVQDNKTWFDFMQKKRYL | |
| BhCas12b | MATRSFILKIEPNEEVKKGLWKTHEVLNHGIAYYMNILKLIRQEAIYEHHEQDPKNPKKVSKAEIQAE | 57 |
| Bacillus | LWDFVLKMQKCNSFTHEVDKDEVFNILRELYEELVPSSVEKKGEANQLSNKFLYPLVDPNSQSGKGTA | |
| hisashii | SSGRKPRWYNLKIAGDPSWEEEKKKWEEDKKKDPLAKILGKLAEYGLIPLFIPYTDSNEPIVKEIKWM | |
| Ref Seq. | EKSRNQSVRRLDKDMFIQALERFLSWESWNLKVKEEYEKVEKEYKTLEERIKEDIQALKALEQYEKER | |
| WP_095142515.1 | QEQLLRDTLNTNEYRLSKRGLRGWREIIQKWLKMDENEPSEKYLEVFKDYQRKHPREAGDYSVYEFLS | |
| | KKENHFIWRNHPEYPYLYATFCEIDKKKKDAKQQATFTLADPINHPLWVRFEERSGSNLNKYRILTEQ | |
| | LHTEKLKKKLTVQLDRLIYPTESGGWEEKGKVDIVLLPSRQFYNQIFLDIEEKGKHAFTYKDESIKFP | |
| | LKGTLGGARVQFDRDHLRRYPHKVESGNVGRIYFNMTVNIEPTESPVSKSLKIHRDDFPKVVNFKPKE | |
| | LTEWIKDSKGKKLKSGIESLEIGLRVMSIDLGQRQAAAASIFEVVDQKPDIEGKLFFPIKGTELYAVH | |
| | RASFNIKLPGETLVKSREVLRKAREDNLKLMNQKLNFLRNVLHFQQFEDITEREKRVTKWISRQENSD | |
| | VPLVYQDELIQIRELMYKPYKDWVAFLKQLHKRLEVEIGKEVKHWRKSLSDGRKGLYGISLKNIDEID | |
| | RTRKFLLRWSLRPTEPGEVRRLEPGQRFAIDQLNHLNALKEDRLKKMANTIIMHALGYCYDVRKKKWQ | |
| | AKNPACQIILFEDLSNYNPYEERSRFENSKLMKWSRREIPRQVALQGEIYGLQVGEVGAQFSSRFHAK | |
| | TGSPGIRCSVVTKEKLQDNRFFKNLQREGRLTLDKIAVLKEGDLYPDKGGEKFISLSKDRKCVTTHAD | |
| | INAAQNLQKRFWTRTHGFYKVYCKAYQVDGQTVYIPESKDQKQKIIEEFGEGYFILKDGVYEWVNAGK | |
| | LKIKKGSSKQSSSELVDSDILKDSFDLASELKGEKLMLYRDPSGNVFPSDKWMAAGVFFGKLERILIS | |
| | KLTNQYSISTIEDDSSKQSM | |
| ThCas12b | MSEKTTQRAYTLRLNRASGECAVCQNNSCDCWHDALWATHKAVNRGAKAFGDWLLTLRGGLCHTLVEM | 58 |
| Thermomonas | EVPAKGNNPPQRPTDQERRDRRVLLALSWLSVEDEHGAPKEFIVATGRDSADDRAKKVEEKLREILEK | |
| hydrothermalis | RDFQEHEIDAWLQDCGPSLKAHIREDAVWVNRRALFDAAVERIKTLTWEEAWDFLEPFFGTQYFAGIG | |
| Ref Seq. | DGKDKDDAEGPARQGEKAKDLVQKAGQWLSARFGIGTGADFMSMAEAYEKIAKWASQAQNGDNGKATI | |
| WP_072754838 | EKLACALRPSEPPTLDTVLKCISGPGHKSATREYLKTLDKKSTVTQEDLNQLRKLADEDARNCRKKVG | |
| | KKGKKPWADEVLKDVENSCELTYLQDNSPARHREFSVMLDHAARRVSMAHSWIKKAEQRRRQFESDAQ | |
| | KLKNLQERAPSAVEWLDRFCESRSMTTGANTGSGYRIRKRAIEGWSYVVQAWAEASCDTEDKRIAAAR | |
| | KVQADPEIEKFGDIQLFEALAADEAICVWRDQEGTQNPSILIDYVTGKTAEHNQKRFKVPAYRHPDEL | |
| | RHPVFCDFGNSRWSIQFAIHKEIRDRDKGAKQDTRQLQNRHGLKMRLWNGRSMTDVNLHWSSKRLTAD | |
| | LALDQNPNPNPTEVTRADRLGRAASSAFDHVKIKNVFNEKEWNGRLQAPRAELDRIAKLEEQGKTEQA | |
| | EKLRKRLRWYVSFSPCLSPSGPFIVYAGQHNIQPKRSGQYAPHAQANKGRARLAQLILSRLPDLRILS | |
| | VDLGHRFAAACAVWETLSSDAFRREIQGLNVLAGGSGEGDLFLHVEMTGDDGKRRTVVYRRIGPDQLL | |
| | DNTPHPAPWARLDRQFLIKLQGEDEGVREASNEELWTVHKLEVEVGRTVPLIDRMVRSGFGKTEKQKE | |
| | RLKKLRELGWISAMPNEPSAETDEKEGEIRSISRSVDELMSSALGTLRLALKRHGNRARIAFAMTADY | |
| | KPMPGGQKYYFHEAKEASKNDDETKRRDNQIEFLQDALSLWHDLFSSPDWEDNEAKKLWQNHIATLPN | |
| | YQTPEEISAELKRVERNKKRKENRDKLRTAAKALAENDQLRQHLHDTWKERWESDDQQWKERLRSLKD | |
| | WIFPRGKAEDNPSIRHVGGLSITRINTISGLYQILKAFKMRPEPDDLRKNIPQKGDDELENFNRRLLE | |
| | ARDRLREQRVKQLASRIIEAALGVGRIKIPKNGKLPKRPRTTVDTPCHAVVIESLKTYRPDDLRTRRE | |
| | NRQLMQWSSAKVRKYLKEGCELYGLHFLEVPANYTSRQCSRTGLPGIRCDDVPTGDFLKAPWWRRAIN | |
| | TAREKNGGDAKDRFLVDLYDHLNNLQSKGEALPATVRVPRQGGNLFIAGAQLDDTNKERRAIQADLNA | |
| | AANIGLRALLDPDWRGRWWYVPCKDGTSEPALDRIEGSTAFNDVRSLPTGDNSSRRAPREIENLWRDP | |
| | SGDSLESGTWSPTRAYWDTVQSRVIELLRRHAGLPTS | |
| LsCas12b | MSIRSFKLKLKTKSGVNAEQLRRGLWRTHQLINDGIAYYMNWLVLLRQEDLFIRNKETNEIEKRSKEE | 59 |
| Laceyella | IQAVLLERVHKQQQRNQWSGEVDEQTLLQALRQLYEEIVPSVIGKSGNASLKARFFLGPLVDPNNKTT | |
| sacchari | KDVSKSGPTPKWKKMKDAGDPNWVQEYEKYMAERQTLVRLEEMGLIPLFPMYTDEVGDIHWLPQASGY | |
| WP_132221894.1 | TRTWDRDMFQQAIERLLSWESWNRRVRERRAQFEKKTHDFASRFSESDVQWMNKLREYEAQQEKSLEE | |
| | NAFAPNEPYALTKKALRGWERVYHSWMRLDSAASEEAYWQEVATCQTAMRGEFGDPAIYQFLAQKENH | |
| | DIWRGYPERVIDFAELNHLQRELRRAKEDATFTLPDSVDHPLWVRYEAPGGTNIHGYDLVQDTKRNLT | |
| | LILDKFILPDENGSWHEVKKVPFSLAKSKQFHRQVWLQEEQKQKKREVVFYDYSTNLPHLGTLAGAKL | |
| | QWDRNFLNKRTQQQIEETGEIGKVFFNISVDVRPAVEVKNGRLQNGLGKALTVLTHPDGTKIVTGWKA | |
| | EQLEKWVGESGRVSSLGLDSLSEGLRVMSIDLGQRTSATVSVFEITKEAPDNPYKFFYQLEGTEMFAV | |
| | HQRSFLLALPGENPPQKIKQMREIRWKERNRIKQQVDQLSAILRLHKKVNEDERIQAIDKLLQKVASW | |
| | QLNEEIATAWNQALSQLYSKAKENDLQWNQAIKNAHHQLEPVVGKQISLWRKDLSTGRQGIAGLSLWS | |
| | IEELEATKKLLTRWSKRSREPGVVKRIERFETFAKQIQHHINQVKENRLKQLANLIVMTALGYKYDQE | |
| | QKKWIEVYPACQVVLFENLRSYRFSFERSRRENKKLMEWSHRSIPKLVQMQGELFGLQVADVYAAYSS | |
| | RYHGRTGAPGIRCHALTEADLRNETNIIHELIEAGFIKEEHRPYLQQGDLVPWSGGELFATLQKPYDN | |
| | PRILTLHADINAAQNIQKRFWHPSMWFRVNCESVMEGEIVTYVPKNKTVHKKQGKTFRFVKVEGSDVY | |
| | EWAKWSKNRNKNTFSSITERKPPSSMILFRDPSGTFFKEQEWVEQKTFWGKVQSMIQAYMKKTIVQRM | |
| | EE | |
| DtCas12b | MVLGRKDDTAELRRALWTTHEHVNLAVAEVERVLLRCRGRSYWTLDRRGDPVHVPESQVAEDALAMAR | 60 |
| Dsulfonatronum | EAQRRNGWPVVGEDEEILLALRYLYEQIVPSCLLDDLGKPLKGDAQKIGTNYAGPLFDSDTCRRDEGK | |
| thiodismutans | DVACCGPFHEVAGKYLGALPEWATPISKQEFDGKDASHLRFKATGGDDAFFRVSIEKANAWYEDPANQ | |
| WP_031386437 | DALKNKAYNKDDWKKEKDKGISSWAVKYIQKQLQLGQDPRTEVRRKLWLELGLLPLFIPVFDKTMVGN | |
| | LWNRLAVRLALAHLLSWESWNHRAVQDQALARAKRDELAALFLGMEDGFAGLREYELRRNESIKQHAF | |
| | EPVDRPYVVSGRALRSWTRVREEWLRHGDTQESRKNICNRLQDRLRGKFGDPDVFHWLAEDGQEALWK | |
| | ERDCVTSFSLLNDADGLLEKRKGYALMTFADARLHPRWAMYEAPGGSNLRTYQIRKTENGLWADVVLL | |
| | SPRNESAAVEEKTFNVRLAPSGQLSNVSFDQIQKGSKMVGRCRYQSANQQFEGLLGGAEILFDRKRIA | |
| | NEQHGATDLASKPGHVWFKLTLDVRPQAPQGWLDGKGRPALPPEAKHFKTALSNKSKFADQVRPGLRV | |
| | LSVDLGVRSFAACSVFELVRGGPDQGTYFPAADGRTVDDPEKLWAKHERSFKITLPGENPSRKEEIAR | |
| | RAAMEELRSLNGDIRRLKAILRLSVLQEDDPRTEHLRLFMEAIVDDPAKSALNAELFKGFGDDRFRST | |
| | PDLWKQHCHFFHDKAEKVVAERFSRWRTETRPKSSSWQDWRERRGYAGGKSYWAVTYLEAVRGLILRW | |
| | NMRGRTYGEVNRQDKKQFGTVASALLHHINQLKEDRIKTGADMIIQAARGFVPRKNGAGWVQVHEPCR | |
| | LILFEDLARYRFRTDRSRRENSRLMRWSHREIVNEVGMQGELYGLHVDTTEAGFSSRYLASSGAPGVR | |
| | CRHLVEEDFHDGLPGMHLVGELDWLLPKDKDRTANEARRLLGGMVRPGMLVPWDGGELFATLNAASQL | |
| | HVIHADINAAQNLQRRFWGRCGEAIRIVCNQLSVDGSTRYEMAKAPKARLLGALQQLKNGDAPFHLTS | |
| | IPNSQKPENSYVMTPTNAGKKYRAGPGEKSSGEEDELALDIVEQAEELAQGRKTFFRDPSGVFFAPDR | |
| | WLPSEIYWSRIRRRIWQVTLERNSSGRQERAEMDEMPY | |

Cas9 with expanded PAM

| | | |
|---|---|---|
| Francisella | MSIYQEFVNKYSLSKTLRFELIPQGKTLENIKARGLILDDEKRAKDYKKAKQIIDKYHQFFIEEILSS | 61 |
| novicida Cpf1 | VCISEDLLQNYSDVYFKLKKSDDDNLQKDFKSAKDTIKKQISEYIKDSEKFKNLFNQNLIDAKKGQES | |
| | DLILWLKQSKDNGIELFKANSDITDIDEALEIIKSFKGWTTYFKGFHENRKNVYSSNDIPTSIIYRIV | |
| | DDNLPKFLENKAKYESLKDKAPEAINYEQIKKDLAEELTFDIDYKTSEVNQRVFSLDEVFEIANFNNY | |
| | LNQSGITKFNTIIGGKFVNGENTKRKGINEYINLYSQQINDKTLKKYKMSVLFKQILSDTESKSFVID | |
| | KLEDDSDVVTTMQSFYEQIAAFKTVEEKSIKETLSLLFDDLKAQKLDLSKIYFKNDKSLTDLSQQVFD | |
| | DYSVIGTAVLEYITQQIAPKNLDNPSKKEQELIAKKTEKAKYLSLETIKLALEEFNKHRDIDKQCRFE | |
| | EILANFAAIPMIFDEIAQNKDNLAQISIKYQNQGKKDLLQASAEDDVKAIKDLLDQTNNLLHKLKIFH | |
| | ISQSEDKANILDKDEHFYLVFEECYFELANIVPLYNKIRNYITQKPYSDEKFKLNFENSTLANGWDKN | |
| | KEPDNTAILFIKDDKYYLGVMNKKNNKIFDDKAIKENKGEGYKKIVYKLLPGANKMLPKVFFSAKSIK | |
| | FYNPSEDILRIRNHSTHTKNGSPQKGYEKFEFNIEDCRKFIDFYKQSISKHPEWKDFGFRFSDTQRYN | |
| | SIDEFYREVENQGYKLTFENISESYIDSVVNQGKLYLFQIYNKDFSAYSKGRPNLHTLYWKALFDERN | |
| | LQDVVYKLNGEAELFYRKQSIPKKITHPAKEAIANKNKDNPKKESVFEYDLIKDKRFTEDKFFFHCPI | |
| | TINFKSSGANKFNDEINLLLKEKANDVHILSIDRGERHLAYYTLVDGKGNIIKQDTFNIIGNDRMKTN | |
| | YHDKLAAIEKDRDSARKDWKKINNIKEMKEGYLSQVVHEIAKLVIEYNAIVVFEDLNFGFKRGRFKVE | |
| | KQVYQKLEKMLIEKLNYLVFKDNEFDKTGGVLRAYQLTAPFETFKKMGKQTGIIYYVPAGFTSKICPV | |
| | TGFVNQLYPKYESVSKSQEFFSKFDKICYNLDKGYFEFSFDYKNFGDKAAKGKWTIASFGSRLINFRN | |
| | SDKNHNWDTREVYPTKELEKLLKDYSIEYGHGECIKAAICGESDKKFFAKLTSVLNTILQMRNSKTGT | |
| | ELDYLISPVADVNGNFFDSRQAPKNMPQDADANGAYHIGLKGLMLLGRIKNNQEGKKLNLVIKNEEYF | |
| | EFVQNRNN | |
| Geobacillus | MKYKIGLDIGITSIGWAVINLDIPRIEDLGVRIFDRAENPKTGESLALPRRLARSARRRLRRRKHRLE | 62 |
| thermo | RIRRLFVREGILTKEELNKLFEKKHEIDVWQLRVEALDRKLNNDELARILLHLAKRRGFRSNRKSERT | |
| denitrificans | NKENSTMLKHIEENQSILSSYRTVAEMVVKDPKFSLHKRNKEDNYTNTVARDDLEREIKLIFAKQREY | |
| Cas9 | GNIVCTEAFEHEYISIWASQRPFASKDDIEKKVGFCTFEPKEKRAPKATYTFQSFTVWEHINKLRLVS | |
| | PGGIRALTDDERRLIYKQAFHKNKITFHDVRTLLNLPDDTRFKGLLYDRNTTLKENEKVRFLELGAYH | |
| | KIRKAIDSVYGKGAAKSFRPIDFDTFGYALTMFKDDTDIRSYLRNEYEQNGKRMENLADKVYDEELIE | |
| | ELLNLSFSKFGHLSLKALRNILPYMEQGEVYSTACERAGYTFTGPKKKQKTVLLPNIPPIANPVVMRA | |
| | LTQARKVVNAIIKKYGSPVSIHIELARELSQSFDERRKMQKEQEGNRKKNETAIRQLVEYGLTLNPTG | |
| | LDIVKFKLWSEQNGKCAYSLQPIEIERLLEPGYTEVDHVIPYSRSLDDSYTNKVLVLTKENREKGNRT | |
| | PAEYLGLGSERWQQFETFVLTNKQFSKKKRDRLLRLHYDENEENEFKNRNLNDTRYISRFLANFIREH | |
| | LKFADSDDKQKVYTVNGRITAHLRSRWNFNKNREESNLHHAVDAAIVACTTPSDIARVTAFYQRREQN | |
| | KELSKKTDPQFPQPWPHFADELQARLSKNPKESIKALNLGNYDNEKLESLQPVFVSRMPKRSITGAAH | |
| | QETLRRYIGIDERSGKIQTVVKKKLSEIQLDKTGHFPMYGKESDPRTYEAIRQRLLEHNNDPKKAFQE | |
| | PLYKPKKNGELGPIIRTIKIIDTTNQVIPLNDGKTVAYNSNIVRVDVFEKDGKYYCVPIYTIDMMKGI | |
| | LPNKAIEPNKPYSEWKEMTEDYTFRFSLYPNDLIRIEFPREKTIKTAVGEEIKIKDLFAYYQTIDSSN | |
| | GGLSLVSHDNNFSLRSIGSRTLKRFEKYQVDVLGNIYKVRGEKRVGVASSSHSKAGETIRPL | |
| Natrono- | MTVIDLDSTTTADELTSGHTYDISVTLTGVYDNTDEQHPRMSLAFEQDNGERRYITLWKNTTPKDVFT | 63 |
| bacterium | YDYATGSTYIFTNIDYEVKDGYENLTATYQTTVENATAQEVGTTDEDETFAGGEPLDHHLDDALNETP | |
| gregoryi | DDAETESDSGHVMTSFASRDQLPEWTLHTYTLTATDGAKTDTEYARRTLAYTVRQELYTDHDAAPVAT | |
| Argonaute | DGLMLLTPEPLGETPLDLDCGVRVEADETRTLDYTTAKDRLLARELVEEGLKRSLWDDYLVRGIDEVL | |
| | SKEPVLTCDEFDLHERYDLSVEVGHSGRAYLHINFRHRFVPKLTLADIDDDNIYPGLRVKTTYRPRRG | |
| | HIVWGLRDECATDSLNTLGNQSVVAYHRNNQTPINTDLLDAIEAADRRVVETRRQGHGDDAVSFPQEL | |
| | LAVEPNTHQIKQFASDGFHQQARSKTRLSASRCSEKAQAFAERLDPVRLNGSTVEFSSEFFTGNNEQQ | |
| | LRLLYENGESVLTFRDGARGAHPDETFSKGIVNPPESFEVAVVLPEQQADTCKAQWDTMADLLNQAGA | |
| | PPTRSETVQYDAFSSPESISLNVAGAIDPSEVDAAFVVLPPDQEGFADLASPTETYDELKKALANMGI | |
| | YSQMAYFDRFRDAKIFYTRNVALGLLAAAGGVAFTTEHAMPGDADMFIGIDVSRSYPEDGASGQINIA | |
| | ATATAVYKDGTILGHSSTRPQLGEKLQSTDVRDIMKNAILGYQQVTGESPTHIVIHRDGFMNEDLDPA | |
| | TEFLNEQGVEYDIVEIRKQPQTRLLAVSDVQYDTPVKSIAAINQNEPRATVATFGAPEYLATRDGGGL | |
| | PRPIQIERVAGETDIETLTRQVYLLSQSHIQVHNSTARLPITTAYADQASTHATKGYLVQTGAFESNV | |
| | GFL | |

Circular permutant Cas9s

| | | |
|---|---|---|
| CP1012 | DYKVYDVRKMIAKSEQEIGKATAKYFFYSNIMNFFKTEITLANGEIRKRPLIETNGETGEIVWDKGRD | 64 |
| | FATVRKVLSMPQVNIVKKTEVQTGGFSKESILPKRNSDKLIARKKDWDPKKYGGFDSPTVAYSVLVVA | |
| | KVEKGKSKKLKSVKELLGITIMERSSFEKNPIDFLEAKGYKEVKKDLIIKLPKYSLFELENGRKRMLA | |
| | SAGELQKGNELALPSKYVNFLYLASHYEKLKGSPEDNEQKQLFVEQHKHYLDEIIEQISEFSKRVILA | |
| | DANLDKVLSAYNKHRDKPIREQAENIIHLFTLTNLGAPAAFKYFDTTIDRKRYTSTKEVLDATLIHQS | |
| | ITGLYETRIDLSQLGGDGGSGGSGGSGGSGGSGGSGGDKKYSIGLAIGTNSVGWAVITDEYKVPSKKF | |
| | KVLGNTDRHSIKKNLIGALLFDSGETAEATRLKRTARRRYTRRKNRICYLQEIFSNEMAKVDDSFFHR | |
| | LEESFLVEEDKKHERHPIFGNIVDEVAYHEKYPTIYHLRKKLVDSTDKADLRLIYLALAHMIKFRGHF | |
| | LIEGDLNPDNSDVDKLFIQLVQTYNQLFEENPINASGVDAKAILSARLSKSRRLENLIAQLPGEKKNG | |
| | LFGNLIALSLGLTPNFKSNFDLAEDAKLQLSKDTYDDDLDNLLAQIGDQYADLFLAAKNLSDAILLSD | |
| | ILRVNTEITKAPLSASMIKRYDEHHQDLTLLKALVRQQLPEKYKEIFFDQSKNGYAGYIDGGASQEEF | |
| | YKFIKPILEKMDGTEELLVKLNREDLLRKQRTFDNGSIPHQIHLGELHAILRRQEDFYPFLKDNREKI | |
| | EKILTFRIPYYVGPLARGNSRFAWMTRKSEETITPWNFEEVVDKGASAQSFIERMTNFDKNLPNEKVL | |
| | PKHSLLYEYFTVYNELTKVKYVTEGMRKPAFLSGEQKKAIVDLLFKTNRKVTVKQLKEDYFKKIECFD | |
| | SVEISGVEDRFNASLGTYHDLLKIIKDKDFLDNEENEDILEDIVLTLTLFEDREMIEERLKTYAHLFD | |
| | DKVMKQLKRRRYTGWGRLSRKLINGIRDKQSGKTILDFLKSDGFANRNFMQLIHDDSLTFKEDIQKAQ | |
| | VSGQGDSLHEHIANLAGSPAIKKGILQTVKVVDELVKVMGRHKPENIVIEMARENQTTQKGQKNSRER | |
| | MKRIEEGIKELGSQILKEHPVENTQLQNEKLYLYYLQNGRDMYVDQELDINRLSDYDVDHIVPQSFLK | |
| | DDSIDNKVLTRSDKNRGKSDNVPSEEVVKKMKNYWRQLLNAKLITQRKFDNLTKAERGGLSELDKAGF | |
| | IKRQLVETRQITKHVAQILDSRMNTKYDENDKLIREVKVITLKSKLVSDFRKDFQFYKVREINNYHHA | |
| | HDAYLNAWGTALIKKYPKLESEFVYG | |
| CP1028 | EIGKATAKYFFYSNIMNFFKTEITLANGEIRKRPLIETNGETGEIVWDKGRDFATVRKVLSMPQVNIV | 65 |
| | KKTEVQTGGFSKESILPKRNSDKLIARKKDWDPKKYGGFDSPTVAYSVLVVAKVEKGKSKKLKSVKEL | |
| | LGITIMERSSFEKNPIDFLEAKGYKEVKKDLIIKLPKYSLFELENGRKRMLASAGELQKGNELALPSK | |
| | YVNFLYLASHYEKLKGSPEDNEQKQLFVEQHKHYLDEIIEQISEFSKRVILADANLDKVLSAYNKHRD | |
| | KPIREQAENIIHLFTLTNLGAPAAFKYFDTTIDRKRYTSTKEVLDATLIHQSITGLYETRIDLSQLGG | |
| | DGGSGGSGGSGGSGGSGGSGGMDKKYSIGLAIGTNSVGWAVITDEYKVPSKKFKVLGNTDRHSIKKNL | |
| | IGALLFDSGETAEATRLKRTARRRYTRRKNRICYLQEIFSNEMAKVDDSFFHRLEESFLVEEDKKHER | |
| | HPIFGNIVDEVAYHEKYPTIYHLRKKLVDSTDKADLRLIYLALAHMIKFRGHFLIEGDLNPDNSDVDK | |
| | LFIQLVQTYNQLFEENPINASGVDAKAILSARLSKSRRLENLIAQLPGEKKNGLFGNLIALSLGLTPN | |
| | FKSNFDLAEDAKLQLSKDTYDDDLDNLLAQIGDQYADLFLAAKNLSDAILLSDILRVNTEITKAPLSA | |
| | SMIKRYDEHHQDLTLLKALVRQQLPEKYKEIFFDQSKNGYAGYIDGGASQEEFYKFIKPILEKMDGTE | |
| | ELLVKLNREDLLRKQRTFDNGSIPHQIHLGELHAILRRQEDFYPFLKDNREKIEKILTFRIPYYVGPL | |
| | ARGNSRFAWMTRKSEETITPWNFEEVVDKGASAQSFIERMTNFDKNLPNEKVLPKHSLLYEYFTVYNE | |
| | LTKVKYVTEGMRKPAFLSGEQKKAIVDLLFKTNRKVTVKQLKEDYFKKIECFDSVEISGVEDRFNASL | |
| | GTYHDLLKIIKDKDFLDNEENEDILEDIVLTLTLFEDREMIEERLKTYAHLFDDKVMKQLKRRRYTGW | |
| | GRLSRKLINGIRDKQSGKTILDFLKSDGFANRNFMQLIHDDSLTFKEDIQKAQVSGQGDSLHEHIANL | |
| | AGSPAIKKGILQTVKVVDELVKVMGRHKPENIVIEMARENQTTQKGQKNSRERMKRIEEGIKELGSQI | |
| | LKEHPVENTQLQNEKLYLYYLQNGRDMYVDQELDINRLSDYDVDHIVPQSFLKDDSIDNKVLTRSDKN | |
| | RGKSDNVPSEEVVKKMKNYWRQLLNAKLITQRKFDNLTKAERGGLSELDKAGFIKRQLVETRQITKHV | |
| | AQILDSRMNTKYDENDKLIREVKVITLKSKLVSDFRKDFQFYKVREINNYHHAHDAYLNAVVGTALIK | |
| | KYPKLESEFVYGDYKVYDVRKMIAKSEQ | |
| CP1041 | NIMNFFKTEITLANGEIRKRPLIETNGETGEIVWDKGRDFATVRKVLSMPQVNIVKKTEVQTGGFSKE | 66 |
| | SILPKRNSDKLIARKKDWDPKKYGGFDSPTVAYSVLVVAKVEKGKSKKLKSVKELLGITIMERSSFEK | |
| | NPIDFLEAKGYKEVKKDLIIKLPKYSLFELENGRKRMLASAGELQKGNELALPSKYVNFLYLASHYEK | |
| | LKGSPEDNEQKQLFVEQHKHYLDEIIEQISEFSKRVILADANLDKVLSAYNKHRDKPIREQAENIIHL | |
| | FTLTNLGAPAAFKYFDTTIDRKRYTSTKEVLDATLIHQSITGLYETRIDLSQLGGDGGSGGSGGSGGS | |
| | GGSGGSGGDKKYSIGLAIGTNSVGWAVITDEYKVPSKKFKVLGNTDRHSIKKNLIGALLFDSGETAEA | |
| | TRLKRTARRRYTRRKNRICYLQEIFSNEMAKVDDSFFHRLEESFLVEEDKKHERHPIFGNIVDEVAYH | |
| | EKYPTIYHLRKKLVDSTDKADLRLIYLALAHMIKFRGHFLIEGDLNPDNSDVDKLFIQLVQTYNQLFE | |
| | ENPINASGVDAKAILSARLSKSRRLENLIAQLPGEKKNGLFGNLIALSLGLTPNFKSNFDLAEDAKLQ | |
| | LSKDTYDDDLDNLLAQIGDQYADLFLAAKNLSDAILLSDILRVNTEITKAPLSASMIKRYDEHHQDLT | |
| | LLKALVRQQLPEKYKEIFFDQSKNGYAGYIDGGASQEEFYKFIKPILEKMDGTEELLVKLNREDLLRK | |
| | QRTFDNGSIPHQIHLGELHAILRRQEDFYPFLKDNREKIEKILTFRIPYYVGPLARGNSRFAWMTRKS | |
| | EETITPWNFEEVVDKGASAQSFIERMTNFDKNLPNEKVLPKHSLLYEYFTVYNELTKVKYVTEGMRKP | |
| | AFLSGEQKKAIVDLLFKTNRKVTVKQLKEDYFKKIECFDSVEISGVEDRFNASLGTYHDLLKIIKDKD | |
| | FLDNEENEDILEDIVLTLTLFEDREMIEERLKTYAHLFDDKVMKQLKRRRYTGWGRLSRKLINGIRDK | |
| | QSGKTILDFLKSDGFANRNFMQLIHDDSLTFKEDIQKAQVSGQGDSLHEHIANLAGSPAIKKGILQTV | |
| | KVVDELVKVMGRHKPENIVIEMARENQTTQKGQKNSRERMKRIEEGIKELGSQILKEHPVENTQLQNE | |
| | KLYLYYLQNGRDMYVDQELDINRLSDYDVDHIVPQSFLKDDSIDNKVLTRSDKNRGKSDNVPSEEVVK | |
| | KMKNYWRQLLNAKLITQRKFDNLTKAERGGLSELDKAGFIKRQLVETRQITKHVAQILDSRMNTKYDE | |
| | NDKLIREVKVITLKSKLVSDFRKDFQFYKVREINNYHHAHDAYLNAVVGTALIKKYPKLESEFVYGDY | |
| | KVYDVRKMIAKSEQEIGKATAKYFFYS | |
| CP1249 | PEDNEQKQLFVEQHKHYLDEIIEQISEFSKRVILADANLDKVLSAYNKHRDKPIREQAENIIHLFTLT | 67 |
| | NLGAPAAFKYFDTTIDRKRYTSTKEVLDATLIHQSITGLYETRIDLSQLGGDGGSGGSGGSGGSGGSG | |
| | GSGGMDKKYSIGLAIGTNSVGWAVITDEYKVPSKKFKVLGNTDRHSIKKNLIGALLFDSGETAEATRL | |
| | KRTARRRYTRRKNRICYLQEIFSNEMAKVDDSFFHRLEESFLVEEDKKHERHPIFGNIVDEVAYHEKY | |
| | PTIYHLRKKLVDSTDKADLRLIYLALAHMIKFRGHFLIEGDLNPDNSDVDKLFIQLVQTYNQLFEENP | |
| | INASGVDAKAILSARLSKSRRLENLIAQLPGEKKNGLFGNLIALSLGLTPNFKSNFDLAEDAKLQLSK | |
| | DTYDDDLDNLLAQIGDQYADLFLAAKNLSDAILLSDILRVNTEITKAPLSASMIKRYDEHHQDLTLLK | |
| | ALVRQQLPEKYKEIFFDQSKNGYAGYIDGGASQEEFYKFIKPILEKMDGTEELLVKLNREDLLRKQRT | |
| | FDNGSIPHQIHLGELHAILRRQEDFYPFLKDNREKIEKILTFRIPYYVGPLARGNSRFAWMTRKSEET | |
| | ITPWNFEEVVDKGASAQSFIERMTNFDKNLPNEKVLPKHSLLYEYFTVYNELTKVKYVTEGMRKPAFL | |
| | SGEQKKAIVDLLFKTNRKVTVKQLKEDYFKKIECFDSVEISGVEDRFNASLGTYHDLLKIIKDKDFLD | |
| | NEENEDILEDIVLTLTLFEDREMIEERLKTYAHLFDDKVMKQLKRRRYTGWGRLSRKLINGIRDKQSG | |
| | KTILDFLKSDGFANRNFMQLIHDDSLTFKEDIQKAQVSGQGDSLHEHIANLAGSPAIKKGILQTVKVV | |
| | DELVKVMGRHKPENIVIEMARENQTTQKGQKNSRERMKRIEEGIKELGSQILKEHPVENTQLQNEKLY | |
| | LYYLQNGRDMYVDQELDINRLSDYDVDHIVPQSFLKDDSIDNKVLTRSDKNRGKSDNVPSEEVVKKMK | |
| | NYWRQLLNAKLITQRKFDNLTKAERGGLSELDKAGFIKRQLVETRQITKHVAQILDSRMNTKYDENDK | |
| | LIREVKVITLKSKLVSDFRKDFQFYKVREINNYHHAHDAYLNAVVGTALIKKYPKLESEFVYGDYKVY | |
| | DVRKMIAKSEQEIGKATAKYFFYSNIMNFFKTEITLANGEIRKRPLIETNGETGEIVWDKGRDFATVR | |
| | KVLSMPQVNIVKKTEVQTGGFSKESILPKRNSDKLIARKKDWDPKKYGGFDSPTVAYSVLVVAKVEKG | |
| | KSKKLKSVKELLGITIMERSSFEKNPIDFLEAKGYKEVKKDLIIKLPKYSLFELENGRKRMLASAGEL | |
| | QKGNELALPSKYVNFLYLASHYEKLKGS | |
| CP1300 | KPIREQAENIIHLFTLTNLGAPAAFKYFDTTIDRKRYTSTKEVLDATLIHQSITGLYETRIDLSQLGG | 68 |
| | DGGSGGSGGSGGSGGSGGSGGDKKYSIGLAIGTNSVGWAVITDEYKVPSKKFKVLGNTDRHSIKKNLI | |
| | GALLFDSGETAEATRLKRTARRRYTRRKNRICYLQEIFSNEMAKVDDSFFHRLEESFLVEEDKKHERH | |
| | PIFGNIVDEVAYHEKYPTIYHLRKKLVDSTDKADLRLIYLALAHMIKFRGHFLIEGDLNPDNSDVDKL | |
| | FIQLVQTYNQLFEENPINASGVDAKAILSARLSKSRRLENLIAQLPGEKKNGLFGNLIALSLGLTPNF | |
| | KSNFDLAEDAKLQLSKDTYDDDLDNLLAQIGDQYADLFLAAKNLSDAILLSDILRVNTEITKAPLSAS | |
| | MIKRYDEHHQDLTLLKALVRQQLPEKYKEIFFDQSKNGYAGYIDGGASQEEFYKFIKPILEKMDGTEE | |
| | LLVKLNREDLLRKQRTFDNGSIPHQIHLGELHAILRRQEDFYPFLKDNREKIEKILTFRIPYYVGPLA | |
| | RGNSRFAWMTRKSEETITPWNFEEVVDKGASAQSFIERMTNFDKNLPNEKVLPKHSLLYEYFTVYNEL | |
| | TKVKYVTEGMRKPAFLSGEQKKAIVDLLFKTNRKVTVKQLKEDYFKKIECFDSVEISGVEDRFNASLG | |
| | TYHDLLKIIKDKDFLDNEENEDILEDIVLTLTLFEDREMIEERLKTYAHLFDDKVMKQLKRRRYTGWG | |
| | RLSRKLINGIRDKQSGKTILDFLKSDGFANRNFMQLIHDDSLTFKEDIQKAQVSGQGDSLHEHIANLA | |
| | GSPAIKKGILQTVKVVDELVKVMGRHKPENIVIEMARENQTTQKGQKNSRERMKRIEEGIKELGSQIL | |
| | KEHPVENTQLQNEKLYLYYLQNGRDMYVDQELDINRLSDYDVDHIVPQSFLKDDSIDNKVLTRSDKNR | |
| | GKSDNVPSEEVVKKMKNYWRQLLNAKLITQRKFDNLTKAERGGLSELDKAGFIKRQLVETRQITKHVA | |
| | QILDSRMNTKYDENDKLIREVKVITLKSKLVSDFRKDFQFYKVREINNYHHAHDAYLNAVVGTALIKK | |
| | YPKLESEFVYGDYKVYDVRKMIAKSEQEIGKATAKYFFYSNIMNFFKTEITLANGEIRKRPLIETNGE | |
| | TGEIVWDKGRDFATVRKVLSMPQVNIVKKTEVQTGGFSKESILPKRNSDKLIARKKDWDPKKYGGFDS | |
| | PTVAYSVLVVAKVEKGKSKKLKSVKELLGITIMERSSFEKNPIDFLEAKGYKEVKKDLIIKLPKYSLF | |
| | ELENGRKRMLASAGELQKGNELALPSKYVNFLYLASHYEKLKGSPEDNEQKQLFVEQHKHYLDEIIEQ | |
| | ISEFSKRVILADANLDKVLSAYNKHRD | |
| CP1012 C- | DYKVYDVRKMIAKSEQEIGKATAKYFFYSNIMNFFKTEITLANGEIRKRPLIETNGETGEIVWDKGRD | 69 |
| terminal | FATVRKVLSMPQVNIVKKTEVQTGGFSKESILPKRNSDKLIARKKDWDPKKYGGFDSPTVAYSVLVVA | |
| fragment | KVEKGKSKKLKSVKELLGITIMERSSFEKNPIDFLEAKGYKEVKKDLIIKLPKYSLFELENGRKRMLA | |
| | SAGELQKGNELALPSKYVNFLYLASHYEKLKGSPEDNEQKQLFVEQHKHYLDEIIEQISEFSKRVILA | |
| | DANLDKVLSAYNKHRDKPIREQAENIIHLFTLTNLGAPAAFKYFDTTIDRKRYTSTKEVLDATLIHQS | |
| | ITGLYETRIDLSQLGGD | |
| CP1028 C- | EIGKATAKYFFYSNIMNFFKTEITLANGEIRKRPLIETNGETGEIVWDKGRDFATVRKVLSMPQVNIV | 70 |
| terminal | KKTEVQTGGFSKESILPKRNSDKLIARKKDWDPKKYGGFDSPTVAYSVLVVAKVEKGKSKKLKSVKEL | |
| fragment | LGITIMERSSFEKNPIDFLEAKGYKEVKKDLIIKLPKYSLFELENGRKRMLASAGELQKGNELALPSK | |
| | YVNFLYLASHYEKLKGSPEDNEQKQLFVEQHKHYLDEIIEQISEFSKRVILADANLDKVLSAYNKHRD | |
| | KPIREQAENIIHLFTLTNLGAPAAFKYFDTTIDRKRYTSTKEVLDATLIHQSITGLYETRIDLSQLGG | |
| | D | |
| CP1041 C- | NIMNFFKTEITLANGEIRKRPLIETNGETGEIVWDKGRDFATVRKVLSMPQVNIVKKTEVQTGGFSKE | 71 |
| terminal | SILPKRNSDKLIARKKDWDPKKYGGFDSPTVAYSVLVVAKVEKGKSKKLKSVKELLGITIMERSSFEK | |
| fragment | NPIDFLEAKGYKEVKKDLIIKLPKYSLFELENGRKRMLASAGELQKGNELALPSKYVNFLYLASHYEK | |
| | LKGSPEDNEQKQLFVEQHKHYLDEIIEQISEFSKRVILADANLDKVLSAYNKHRDKPIREQAENIIHL | |
| | FTLTNLGAPAAFKYFDTTIDRKRYTSTKEVLDATLIHQSITGLYETRIDLSQLGGD | |
| CP1249 C- | PEDNEQKQLFVEQHKHYLDEIIEQISEFSKRVILADANLDKVLSAYNKHRDKPIREQAENIIHLFTLT | 72 |
| terminal | NLGAPAAFKYFDTTIDRKRYTSTKEVLDATLIHQSITGLYETRIDLSQLGGD | |
| fragment | | |
| CP1300 C- | KPIREQAENIIHLFTLTNLGAPAAFKYFDTTIDRKRYTSTKEVLDATLIHQSITGLYETRIDLSQLGG | 73 |
| terminal | D | |
| fragment | | |

Cas9 with modified PAM

| | | |
|---|---|---|
| SpCas9-VRQR | DKKYSIGLDIGTNSVGWAVITDEYKVPSKKFKVLGNTDRHSIKKNLIGALLFDSGETAEATRLKRTAR | 74 |
| | RRYTRRKNRICYLQEIFSNEMAKVDDSFFHRLEESFLVEEDKKHERHPIFGNIVDEVAYHEKYPTIYH | |
| | LRKKLVDSTDKADLRLIYLALAHMIKFRGHFLIEGDLNPDNSDVDKLFIQLVQTYNQLFEENPINASG | |
| | VDAKAILSARLSKSRRLENLIAQLPGEKKNGLFGNLIALSLGLTPNFKSNFDLAEDAKLQLSKDTYDD | |
| | DLDNLLAQIGDQYADLFLAAKNLSDAILLSDILRVNTEITKAPLSASMIKRYDEHHQDLTLLKALVRQ | |
| | QLPEKYKEIFFDQSKNGYAGYIDGGASQEEFYKFIKPILEKMDGTEELLVKLNREDLLRKQRTFDNGS | |
| | IPHQIHLGELHAILRRQEDFYPFLKDNREKIEKILTFRIPYYVGPLARGNSRFAWMTRKSEETITPWN | |
| | FEEVVDKGASAQSFIERMTNFDKNLPNEKVLPKHSLLYEYFTVYNELTKVKYVTEGMRKPAFLSGEQK | |
| | KAIVDLLFKTNRKVTVKQLKEDYFKKIECFDSVEISGVEDRFNASLGTYHDLLKIIKDKDFLDNEENE | |
| | DILEDIVLTLTLFEDREMIEERLKTYAHLFDDKVMKQLKRRRYTGWGRLSRKLINGIRDKQSGKTILD | |
| | FLKSDGFANRNFMQLIHDDSLTFKEDIQKAQVSGQGDSLHEHIANLAGSPAIKKGILQTVKVVDELVK | |
| | VMGRHKPENIVIEMARENQTTQKGQKNSRERMKRIEEGIKELGSQILKEHPVENTQLQNEKLYLYYLQ | |
| | NGRDMYVDQELDINRLSDYDVDAIVPQSFLKDDSIDNKVLTRSDKNRGKSDNVPSEEVVKKMKNYWRQ | |
| | LLNAKLITQRKFDNLTKAERGGLSELDKAGFIKRQLVETRQITKHVAQILDSRMNTKYDENDKLIREV | |
| | KVITLKSKLVSDFRKDFQFYKVREINNYHHAHDAYLNAVVGTALIKKYPKLESEFVYGDYKVYDVRKM | |
| | IAKSEQEIGKATAKYFFYSNIMNFFKTEITLANGEIRKRPLIETNGETGEIVWDKGRDFATVRKVLSM | |
| | PQVNIVKKTEVQTGGFSKESILPKRNSDKLIARKKDWDPKKYGGFVSPTVAYSVLVVAKVEKGKSKKL | |
| | KSVKELLGITIMERSSFEKNPIDFLEAKGYKEVKKDLIIKLPKYSLFELENGRKRMLASARELQKGNE | |
| | LALPSKYVNFLYLASHYEKLKGSPEDNEQKQLFVEQHKHYLDEIIEQISEFSKRVILADANLDKVLSA | |
| | YNKHRDKPIREQAENIIHLFTLTNLGAPAAFKYFDTTIDRKQYRSTKEVLDATLIHQSITGLYETRID | |
| | LSQLGGD | |
| SpCas9-VQR | DKKYSIGLDIGTNSVGWAVITDEYKVPSKKFKVLGNTDRHSIKKNLIGALLFDSGETAEATRLKRTAR | 75 |
| | RRYTRRKNRICYLQEIFSNEMAKVDDSFFHRLEESFLVEEDKKHERHPIFGNIVDEVAYHEKYPTIYH | |
| | LRKKLVDSTDKADLRLIYLALAHMIKFRGHFLIEGDLNPDNSDVDKLFIQLVQTYNQLFEENPINASG | |
| | VDAKAILSARLSKSRRLENLIAQLPGEKKNGLFGNLIALSLGLTPNFKSNFDLAEDAKLQLSKDTYDD | |
| | DLDNLLAQIGDQYADLFLAAKNLSDAILLSDILRVNTEITKAPLSASMIKRYDEHHQDLTLLKALVRQ | |
| | QLPEKYKEIFFDQSKNGYAGYIDGGASQEEFYKFIKPILEKMDGTEELLVKLNREDLLRKQRTFDNGS | |
| | IPHQIHLGELHAILRRQEDFYPFLKDNREKIEKILTFRIPYYVGPLARGNSRFAWMTRKSEETITPWN | |
| | FEEVVDKGASAQSFIERMTNFDKNLPNEKVLPKHSLLYEYFTVYNELTKVKYVTEGMRKPAFLSGEQK | |
| | KAIVDLLFKTNRKVTVKQLKEDYFKKIECFDSVEISGVEDRFNASLGTYHDLLKIIKDKDFLDNEENE | |
| | DILEDIVLTLTLFEDREMIEERLKTYAHLFDDKVMKQLKRRRYTGWGRLSRKLINGIRDKQSGKTILD | |
| | FLKSDGFANRNFMQLIHDDSLTFKEDIQKAQVSGQGDSLHEHIANLAGSPAIKKGILQTVKVVDELVK | |
| | VMGRHKPENIVIEMARENQTTQKGQKNSRERMKRIEEGIKELGSQILKEHPVENTQLQNEKLYLYYLQ | |
| | NGRDMYVDQELDINRLSDYDVDAIVPQSFLKDDSIDNKVLTRSDKNRGKSDNVPSEEVVKKMKNYWRQ | |
| | LLNAKLITQRKFDNLTKAERGGLSELDKAGFIKRQLVETRQITKHVAQILDSRMNTKYDENDKLIREV | |
| | KVITLKSKLVSDFRKDFQFYKVREINNYHHAHDAYLNAVVGTALIKKYPKLESEFVYGDYKVYDVRKM | |
| | IAKSEQEIGKATAKYFFYSNIMNFFKTEITLANGEIRKRPLIETNGETGEIVWDKGRDFATVRKVLSM | |
| | PQVNIVKKTEVQTGGFSKESILPKRNSDKLIARKKDWDPKKYGGFVSPTVAYSVLVVAKVEKGKSKKL | |
| | KSVKELLGITIMERSSFEKNPIDFLEAKGYKEVKKDLIIKLPKYSLFELENGRKRMLASAGELQKGNE | |
| | LALPSKYVNFLYLASHYEKLKGSPEDNEQKQLFVEQHKHYLDEIIEQISEFSKRVILADANLDKVLSA | |
| | YNKHRDKPIREQAENIIHLFTLTNLGAPAAFKYFDTTIDRKQYRSTKEVLDATLIHQSITGLYETRID | |
| | LSQLGGD | |
| SpCas9-VRER | DKKYSIGLDIGTNSVGWAVITDEYKVPSKKFKVLGNTDRHSIKKNLIGALLFDSGETAEATRLKRTAR | 76 |
| | RRYTRRKNRICYLQEIFSNEMAKVDDSFFHRLEESFLVEEDKKHERHPIFGNIVDEVAYHEKYPTIYH | |
| | LRKKLVDSTDKADLRLIYLALAHMIKFRGHFLIEGDLNPDNSDVDKLFIQLVQTYNQLFEENPINASG | |
| | VDAKAILSARLSKSRRLENLIAQLPGEKKNGLFGNLIALSLGLTPNFKSNFDLAEDAKLQLSKDTYDD | |
| | DLDNLLAQIGDQYADLFLAAKNLSDAILLSDILRVNTEITKAPLSASMIKRYDEHHQDLTLLKALVRQ | |
| | QLPEKYKEIFFDQSKNGYAGYIDGGASQEEFYKFIKPILEKMDGTEELLVKLNREDLLRKQRTFDNGS | |
| | IPHQIHLGELHAILRRQEDFYPFLKDNREKIEKILTFRIPYYVGPLARGNSRFAWMTRKSEETITPWN | |
| | FEEVVDKGASAQSFIERMTNFDKNLPNEKVLPKHSLLYEYFTVYNELTKVKYVTEGMRKPAFLSGEQK | |
| | KAIVDLLFKTNRKVTVKQLKEDYFKKIECFDSVEISGVEDRFNASLGTYHDLLKIIKDKDFLDNEENE | |
| | DILEDIVLTLTLFEDREMIEERLKTYAHLFDDKVMKQLKRRRYTGWGRLSRKLINGIRDKQSGKTILD | |
| | FLKSDGFANRNFMQLIHDDSLTFKEDIQKAQVSGQGDSLHEHIANLAGSPAIKKGILQTVKVVDELVK | |
| | VMGRHKPENIVIEMARENQTTQKGQKNSRERMKRIEEGIKELGSQILKEHPVENTQLQNEKLYLYYLQ | |
| | NGRDMYVDQELDINRLSDYDVDAIVPQSFLKDDSIDNKVLTRSDKNRGKSDNVPSEEVVKKMKNYWRQ | |
| | LLNAKLITQRKFDNLTKAERGGLSELDKAGFIKRQLVETRQITKHVAQILDSRMNTKYDENDKLIREV | |
| | KVITLKSKLVSDFRKDFQFYKVREINNYHHAHDAYLNAVVGTALIKKYPKLESEFVYGDYKVYDVRKM | |
| | IAKSEQEIGKATAKYFFYSNIMNFFKTEITLANGEIRKRPLIETNGETGEIVWDKGRDFATVRKVLSM | |
| | PQVNIVKKTEVQTGGFSKESILPKRNSDKLIARKKDWDPKKYGGFVSPTVAYSVLVVAKVEKGKSKKL | |
| | KSVKELLGITIMERSSFEKNPIDFLEAKGYKEVKKDLIIKLPKYSLFELENGRKRMLASARELQKGNE | |
| | LALPSKYVNFLYLASHYEKLKGSPEDNEQKQLFVEQHKHYLDEIIEQISEFSKRVILADANLDKVLSA | |
| | YNKHRDKPIREQAENIIHLFTLTNLGAPAAFKYFDTTIDRKEYRSTKEVLDATLIHQSITGLYETRID | |
| | LSQLGGD | |
| SpCas9-NG | MDKKYSIGLDIGTNSVGWAVITDEYKVPSKKFKVLGNTDRHSIKKNLIGALLFDSGETAEATRLKRTA | 77 |
| | RRRYTRRKNRICYLQEIFSNEMAKVDDSFFHRLEESFLVEEDKKHERHPIFGNIVDEVAYHEKYPTIY | |
| | HLRKKLVDSTDKADLRLIYLALAHMIKFRGHFLIEGDLNPDNSDVDKLFIQLVQTYNQLFEENPINAS | |
| | GVDAKAILSARLSKSRRLENLIAQLPGEKKNGLFGNLIALSLGLTPNFKSNFDLAEDAKLQLSKDTYD | |
| | DDLDNLLAQIGDQYADLFLAAKNLSDAILLSDILRVNTEITKAPLSASMIKRYDEHHQDLTLLKALVR | |
| | QQLPEKYKEIFFDQSKNGYAGYIDGGASQEEFYKFIKPILEKMDGTEELLVKLNREDLLRKQRTFDNG | |
| | SIPHQIHLGELHAILRRQEDFYPFLKDNREKIEKILTFRIPYYVGPLARGNSRFAWMTRKSEETITPW | |
| | NFEEVVDKGASAQSFIERMTNFDKNLPNEKVLPKHSLLYEYFTVYNELTKVKYVTEGMRKPAFLSGEQ | |
| | KKAIVDLLFKTNRKVTVKQLKEDYFKKIECFDSVEISGVEDRFNASLGTYHDLLKIIKDKDFLDNEEN | |
| | EDILEDIVLTLTLFEDREMIEERLKTYAHLFDDKVMKQLKRRRYTGWGRLSRKLINGIRDKQSGKTIL | |
| | DFLKSDGFANRNFMQLIHDDSLTFKEDIQKAQVSGQGDSLHEHIANLAGSPAIKKGILQTVKVVDELV | |
| | KVMGRHKPENIVIEMARENQTTQKGQKNSRERMKRIEEGIKELGSQILKEHPVENTQLQNEKLYLYYL | |
| | QNGRDMYVDQELDINRLSDYDVDHIVPQSFLKDDSIDNKVLTRSDKNRGKSDNVPSEEVVKKMKNYWR | |
| | QLLNAKLITQRKFDNLTKAERGGLSELDKAGFIKRQLVETRQITKHVAQILDSRMNTKYDENDKLIRE | |
| | VKVITLKSKLVSDFRKDFQFYKVREINNYHHAHDAYLNAVVGTALIKKYPKLESEFVYGDYKVYDVRK | |
| | MIAKSEQEIGKATAKYFFYSNIMNFFKTEITLANGEIRKRPLIETNGETGEIVWDKGRDFATVRKVLS | |
| | MPQVNIVKKTEVQTGGFSKESIRPKRNSDKLIARKKDWDPKKYGGFVSPTVAYSVLVVAKVEKGKSKK | |
| | LKSVKELLGITIMERSSFEKNPIDFLEAKGYKEVKKDLIIKLPKYSLFELENGRKRMLASARFLQKGN | |
| | ELALPSKYVNFLYLASHYEKLKGSPEDNEQKQLFVEQHKHYLDEIIEQISEFSKRVILADANLDKVLS | |
| | AYNKHRDKPIREQAENIIHLFTLTNLGAPRAFKYFDTTIDRKVYRSTKEVLDATLIHQSITGLYETRI | |
| | DLSQLGGD | |

Adenine deaminases

| | | SEQ ID |
|---|---|---|
| DESCRIPTION | SEQUENCE | NO: |
| E. coli TadA | MSEVEFSHEYWMRHALTLAKRAWDEREVPVGAVLVHNNRVIGEGWNRPIGRHDPTAHAEIMALRQGGL | 78 |
| | VMQNYRLIDATLYVTLEPCVMCAGAMIHSRIGRVVFGARDAKTGAAGSLMDVLHHPGMNHRVEITEGI | |
| | LADECAALLSDFFRMRRQEIKAQKKAQSSTD | |
| E. coli TadA | MSEVEFSHEYWMRHALTLAKRARDEREVPVGAVLVLNNRVIGEGWNRAIGLHDPTAHAEIMALRQGGL | 79 |
| 7.10 | VMQNYRLIDATLYVTFEPCVMCAGAMIHSRIGRVVFGVRNAKTGAAGSLMDVLHYPGMNHRVEITEGI | |
| | LADECAALLCYFFRMPRQVFNAQKKAQSSTD | |
| E. coli TadA | MSEVEFSHEYWMRHALTLAKRARDEREVPVGAVLVLNNRVIGEGWNRAIGLHDPTAHAEIMALRQGGL | 80 |
| 7.10 (V106W) | VMQNYRLIDATLYVTFEPCVMCAGAMIHSRIGRVVFGWRNAKTGAAGSLMDVLHYPGMNHRVEITEGI | |
| | LADECAALLCYFFRMPRQVFNAQKKAQSSTD | |
| Staphylococcus | MGSHMTNDIYFMTLAIEEAKKAAQLGEVPIGAIITKDDEVIARAHNLRETLQQPTAHAEHIAIERAAK | 81 |
| aureus TadA | VLGSWRLEGCTLYVTLEPCVMCAGTIVMSRIPRVVYGADDPKGGCSGSLMNLLQQSNFNHRAIVDKGV | |
| | LKEACSTLLTTFFKNLRANKKSTN | |
| Bacillus | MTQDELYMKEAIKEAKKAEEKGEVPIGAVLVINGEIIARAHNLRETEQRSIAHAEMLVIDEACKALGT | 82 |
| subtilis TadA | WRLEGATLYVTLEPCPMCAGAVVLSRVEKVVFGAFDPKGGCSGTLMNLLQEERFNHQAEVVSGVLEEE | |
| | CGGMLSAFFRELRKKKKAARKNLSE | |
| Salmonella | MPPAFITGVTSLSDVELDHEYWMRHALTLAKRAWDEREVPVGAVLVHNHRVIGEGWNRPIGRHDPTAH | 83 |
| typhimurium | AEIMALRQGGLVLQNYRLLDTTLYVTLEPCVMCAGAMVHSRIGRVVFGARDAKTGAAGSLIDVLHHPG | |
| TadA | MNHRVEIIEGVLRDECATLLSDFFRMRRQEIKALKKADRAEGAGPAV | |
| Shewanella | MDEYWMQVAMQMAEKAEAAGEVPVGAVLVKDGQQIATGYNLSISQHDPTAHAEILCLRSAGKKLENYR | 84 |
| putrefaciens | LLDATLYITLEPCAMCAGAMVHSRIARVVYGARDEKTGAAGTVVNLLQHPAFNHQVEVTSGVLAEACS | |
| TadA | AQLSRFFKRRRDEKKALKLAQRAQQGIE | |
| Haemophilus | MDAAKVRSEFDEKMMRYALELADKAEALGEIPVGAVLVDDARNIIGEGWNLSIVQSDPTAHAEIIALR | 85 |
| influenzae | NGAKNIQNYRLLNSTLYVTLEPCTMCAGAILHSRIKRLVFGASDYKTGAIGSRFHFFDDYKMNHTLEI | |
| F3031 TadA | TSGVLAEECSQKLSTFFQKRREEKKIEKALLKSLSDK | |
| Caulobacter | MRTDESEDQDHRMMRLALDAARAAAEAGETPVGAVILDPSTGEVIATAGNGPIAAHDPTAHAEIAAMR | 86 |
| crescentus | AAAAKLGNYRLTDLTLWTLEPCAMCAGAISHARIGRWFGADDPKGGAWHGPKFFAQPTCHWRPEV | |
| TadA | TGGVLADESADLLRGFFRARRKAK1 | |
| Geobacter | MSSLKKTPIRDDAYWMGKAIREAAKAAARDEVPIGAVIVRDGAVIGRGHNLREGSNDPSAHAEMIAIR | 87 |
| sulfurreducens | QAARRSANWRLTGATLYVTLEPCLMCMGAIILARLERVVFGCYDPKGAAGSLYDLSADPRLNHQVRLS | |
| TadA | PGVCQEECGTMLSDFFRDLRRRKKAKATPALFIDERKVPPEP | |
| E. coli TadA | MSEVEFSHEYWMRHALTLAKRAWDEREVPVGAVLVHNNRVIGEGWNRPIGRHDPTAHAEIMALRQGGL | 78 |
| | VMQNYRLIDATLYVTLEPCVMCAGAMIHSRIGRVVFGARDAKTGAAGSLMDVLHHPGMNHRVEITEGI | |
| | LADECAALLSDFFRMRRQEIKAQKKAQSSTD | |
| ecTadA | MRRAFITGVFFLSEVEFSHEYWMRHALTLAKRAWDEREVPVGAVLVHNNRVIGEGWNRPIGRHDPTAH | 89 |
| | AEIMALRQGGLVMQNYRLIDATLYVTLEPCVMCAGAMIHSRIGRVVFGARDAKTGAAGSLMDVLHHPG | |
| | MNHRVEITEGILADECAALLSDFFRMRRQEIKAQKKAQSSTD | |
| ABES TadA* | TCTGAGGTGGAGTTTTCCCACGAGTACTGGATGAGACATGCCCTGACCCTGGCCAAGAGGGCACGGGA | 90 |
| monomer (aka | TGAGAGGGAGGTGCCTGTGGGAGCCGTGCTGGTGCTGAACAATAGAGTGATCGGCGAGGGCTGGAACA | |
| TadA-8e) | GAGCCATCGGCCTGCACGACCCAACAGCCCATGCCGAAATTATGGCCCTGAGACAGGGCGGCCTGGTC | |
| | ATGCAGAACTACAGACTGATTGACGCCACCCTGTACGTGACATTCGAGCCTTGCGTGATGTGCGCCGG | |
| | CGCCATGATCCACTCTAGGATCGGCCGCGTGGTGTTTGGCGTGAGGAACTCAAAAAGAGGCGCCGCAG | |
| | GCTCCCTGATGAACGTGCTGAACTACCCCGGCATGAATCACCGCGTCGAAATTACCGAGGGAATCCTG | |
| | GCAGATGAATGTGCCGCCCTGCTGTGCGATTTCTATCGGATGCCTAGACAGGTGTTCAATGCTCAGAA | |
| | GAAGGCCCAGAGCTCCATCAAC | |
| ABES TadA* | MSEVEFSHEYWMRHALTLAKRARDEREVPVGAVLVLNNRVIGEGWNRAIGLHDPTAHAEIMALRQGGL | 91 |
| monomer (aka | VMQNYRLIDATLYVTFEPCVMCAGAMIHSRIGRVVFGVRNSKRGAAGSLMNVLNYPGMNHRVEITEGI | |
| TadA-8e) | LADECAALLCDFYRMPRQVFNAQKKAQSSIN | |
| ABES TadA* | MSEVEFSHEYWMRHALTLAKRARDEREVPVGAVLVLNNRVIGEGWNRAIGLHDPTAHAEIMALRQGGL | 462 |
| V106W variant | VMQNYRLIDATLYVTFEPCVMCAGAMIHSRIGRVVFGWRNSKRGAAGSLMNVLNYPGMNHRVEITEGI | |
| | LADECAALLCDFYRMPRQVFNAQKKAQSSIN | |
| E. coli TadA* | MSEVEFSHEYWMRHALTLAKRARDEREVPVGAVLVLNNRVIGEGWNRAIGLHDPTAHAEIMALRQGGL | 79 |
| 7.10 | VMQNYRLIDATLYVTFEPCVMCAGAMIHSRIGRVVFGVRNAKTGAAGSLMDVLHYPGMNHRVEITEGI | |
| | LADECAALLCYFFRMPRQVFNAQKKAQSSTD | |
| ABE7.10 TadA* | TCTGAGGTGGAGTTTTCCCACGAGTACTGGATGAGACATGCCCTGACCCTGGCCAAGAGGGCACGCGA | 404 |
| monomer | TGAGAGGGAGGTGCCTGTGGGAGCCGTGCTGGTGCTGAACAATAGAGTGATCGGCGAGGGCTGGAACA | |
| | GAGCCATCGGCCTGCACGACCCAACAGCCCATGCCGAAATTATGGCCCTGAGACAGGGCGGCCTGGTC | |
| | ATGCAGAACTACAGACTGATTGACGCCACCCTGTACGTGACATTCGAGCCTTGCGTGATGTGCGCCGG | |
| | CGCCATGATCCACTCTAGGATCGGCCGCGTGGTGTTTGGCGTGAGGAACGCAAAAACCGGCGCCGCAG | |
| | GCTCCCTGATGGACGTGCTGCACTACCCCGGCATGAATCACCGCGTCGAAATTACCGAGGGAATCCTG | |
| | GCAGATGAATGTGCCGCCCTGCTGTGCTATTTCTTTCGGATGCCTAGACAGGTGTTCAATGCTCAGAA | |
| | GAAGGCCCAGAGCTCCACCGAC | |

Cytidine deaminases

| | | SEQ ID |
|---|---|---|
| DESCRIPTION | SEQUENCE | NO: |
| Human AID | MDSLLMNRRKFLYQFKNVRWAKGRRETYLCYVVKRRDSATSFSLDFGYLRNKNGCHVELLFLRYISDW | 92 |
| | DLDPGRCYRVTWFTSWSPCYDCARHVADFLRGNPNLSLRIFTARLYFCEDRKAEPEGLRRLHRAGVQI | |
| | AIMTFKDYFYCWNTFVENHERTFKAWEGLHENSVRLSRQLRRILLPLYEVDDLRDAFRTLGL | |
| Mouse AID | MDSLLMKQKKFLYHFKNVRWAKGRHETYLCYVVKRRDSATSCSLDFGHLRNKSGCHVELLFLRYISDW | 93 |
| | DLDPGRCYRVTWFTSWSPCYDCARHVAEFLRWNPNLSLRIFTARLYFCEDRKAEPEGLRRLHRAGVQI | |
| | GIMTFKDYFYCWNTFVENRERTFKAWEGLHENSVRLTRQLRRILLPLYEVDDLRDAFRMLGF | |
| Dog AID | MDSLLMKQRKFLYHFKNVRWAKGRHETYLCYVVKRRDSATSFSLDFGHLRNKSGCHVELLFLRYISDW | 94 |
| | DLDPGRCYRVTWFTSWSPCYDCARHVADFLRGYPNLSLRIFAARLYFCEDRKAEPEGLRRLHRAGVQI | |
| | AIMTFKDYFYCWNTFVENREKTFKAWEGLHENSVRLSRQLRRILLPLYEVDDLRDAFRTLGL | |
| Bovine AID | MDSLLKKQRQFLYQFKNVRWAKGRHETYLCYVVKRRDSPTSFSLDFGHLRNKAGCHVELLFLRYISDW | 95 |
| | DLDPGRCYRVTWFTSWSPCYDCARHVADFLRGYPNLSLRIFTARLYFCDKERKAEPEGLRRLHRAGVQ | |
| | IAIMTFKDYFYCWNTFVENHERTFKAWEGLHENSVRLSRQLRRILLPLYEVDDLRDAFRTLGL | |
| Rat: AID | MAVGSKPKAALVGPHWERERIWCFLCSTGLGTQQTGQTSRWLRPAATQDPVSPPRSLLMKQRKFLYHF | 96 |
| | KNVRWAKGRHETYLCYVVKRRDSATSFSLDFGYLRNKSGCHVELLFLRYISDWDLDPGRCYRVTWFTS | |
| | WSPCYDCARHVADFLRGNPNLSLRIFTARLTGWGALPAGLMSPARPSDYFYCWNTFVENHERTFKAWE | |
| | GLHENSVRLSRRLRRILLPLYEVDDLRDAFRTLGL | |
| Mouse APOBEC-3 | MGPFCLGCSHRKCYSPIRNLISQETFKFHFKNLGYAKGRKDTFLCYEVTRKDCDSPVSLHHGVFKNKD | 97 |
| | NIHAEICFLYWFHDKVLKVLSPREEFKITWYMSWSPCFECAEQIVRFLATHHNLSLDIFSSRLYNVQD | |
| | PETQQNLCRLVQEGAQVAAMDLYEFKKCWKKFVDNGGRRFRPWKRLLTNFRYQDSKLQEILRPCYIPV | |
| | PSSSSSTLSNICLTKGLPETRFCVEGRRMDPLSEEEFYSQFYNQRVKHLCYYHRMKPYLCYQLEQFNG | |
| | QAPLKGCLLSEKGKQHAEILFLDKIRSMELSQVTITCYLTWSPCPNCAWQLAAFKRDRPDLILHIYTS | |
| | RLYFHWKRPFQKGLCSLWQSGILVDVMDLPQFTDCWTNFVNPKRPFWPWKGLEIISRRTQRRLRRIKE | |
| | SWGLQDLVNDFGNLQLGPPMS | |
| Rat APOBEC-3 | MGPFCLGCSHRKCYSPIRNLISQETFKFHFKNLRYAIDRKDTFLCYEVTRKDCDSPVSLHHGVFKNKD | 98 |
| | NIHAEICFLYWFHDKVLKVLSPREEFKITWYMSWSPCFECAEQVLRFLATHHNLSLDIFSSRLYNIRD | |
| | PENQQNLCRLVQEGAQVAAMDLYEFKKCWKKFVDNGGRRFRPWKKLLTNFRYQDSKLQEILRPCYIPV | |
| | PSSSSSTLSNICLTKGLPETRFCVERRRVHLLSEEEFYSQFYNQRVKHLCYYHGVKPYLCYQLEQFNG | |
| | QAPLKGCLLSEKGKQHAEILFLDKIRSMELSQVIITCYLTWSPCPNCAWQLAAFKRDRPDLILHIYTS | |
| | RLYFHWKRPFQKGLCSLWQSGILVDVMDLPQFTDCWTNFVNPKRPFWPWKGLEIISRRTQRRLHRIKE | |
| | SWGLQDLVNDFGNLQLGPPMS | |
| Rhesus macaque | MVEPMDPRTFVSNFNNRPILSGLNTVWLCCEVKTKDPSGPPLDAKIFQGKVYSKAKYHPEMRFLRWFH | 99 |
| APOBEC-3G | KWRQLHHDQEYKVTWYVSWSPCTRCANSVATFLAKDPKVTLTIFVARLYYFWKPDYQQALRILCQKRG | |
| | GPHATMKIMNYNEFQDCWNKFVDGRGKPFKPRNNLPKHYTLLQATLGELLRHLMDPGTFTSNFNNKPW | |
| | VSGQHETYLCYKVERLHNDTWVPLNQHRGFLRNQAPNIHGFPKGRHAELCFLDLIPFWKLDGQQYRVT | |
| | CFTSWSPCFSCAQEMAKFISNNEHVSLCIFAARIYDDQGRYQEGLRALHRDGAKIAMMNYSEFEYCWD | |
| | TFVDRQGRPFQPWDGLDEHSQALSGRLRAI | |
| Chimpanzee | MKPHFRNPVERMYQDTFSDNFYNRPILSHRNTVWLCYEVKTKGPSRPPLDAKIFRGQVYSKLKYHPEM | 100 |
| APOBEC-3G | RFFHWFSKWRKLHRDQEYEVTWYISWSPCTKCTRDVATFLAEDPKVTLTIFVARLYYFWDPDYQEALR | |
| | SLCQKRDGPRATMKIMNYDEFQHCWSKFVYSQRELFEPWNNLPKYYILLHIMLGEILRHSMDPPTFTS | |
| | NFNNELWVRGRHETYLCYEVERLHNDTWVLLNQRRGFLCNQAPHKHGFLEGRHAELCFLDVIPFWKLD | |
| | LHQDYRVTCFTSWSPCFSCAQEMAKFISNNKHVSLCIFAARIYDDQGRCQEGLRTLAKAGAKISIMTY | |
| | SEFKHCWDTFVDHQGCPFQPWDGLEEHSQALSGRLRAILQNQGN | |
| Green monkey | MNPQIRNMVEQMEPDIFVYYFNNRPILSGRNTVWLCYEVKTKDPSGPPLDANIFQGKLYPEAKDHPEM | 101 |
| APOBEC-3G | KFLHWFRKWRQLHRDQEYEVTWYVSWSPCTRCANSVATFLAEDPKVTLTIFVARLYYFWKPDYQQALR | |
| | ILCQERGGPHATMKIMNYNEFQHCWNEFVDGQGKPFKPRKNLPKHYTLLHATLGELLRHVMDPGTFTS | |
| | NFNNKPWVSGQRETYLCYKVERSHNDTWVLLNQHRGFLRNQAPDRHGFPKGRHAELCFLDLIPFWKLD | |
| | DQQYRVTCFTSWSPCFSCAQKMAKFISNNKHVSLCIFAARIYDDQGRCQEGLRTLHRDGAKIAVMNYS | |
| | EFEYCWDTFVDRQGRPFQPWDGLDEHSQALSGRLRAI | |
| Human APOBEC- | MKPHFRNTVERMYRDTFSYNFYNRPILSRRNTVWLCYEVKTKGPSRPPLDAKIFRGQVYSELKYHPEM | 102 |
| 3G | RFFHWFSKWRKLHRDQEYEVTWYISWSPCTKCTRDMATFLAEDPKVTLTIFVARLYYFWDPDYQEALR | |
| | SLCQKRDGPRATMKIMNYDEFQHCWSKFVYSQRELFEPWNNLPKYYILLHIMLGEILRHSMDPPTFTF | |
| | NFNNEPWVRGRHETYLCYEVERMHNDTWVLLNQRRGFLCNQAPHKHGFLEGRHAELCFLDVIPFWKLD | |
| | LDQDYRVTCFTSWSPCFSCAQEMAKFISKNKHVSLCIFTARIYDDQGRCQEGLRTLAEAGAKISIMTY | |
| | SEFKHCWDTFVDHQGCPFQPWDGLDEHSQDLSGRLRAILQNQEN | |
| Human APOBEC- | MKPHFRNTVERMYRDTFSYNFYNRPILSRRNTVWLCYEVKTKGPSRPRLDAKIFRGQVYSQPEHHAEM | 103 |
| 3F | CFLSWFCGNQLPAYKCFQITWFVSWTPCPDCVAKLAEFLAEHPNVTLTISAARLYYYWERDYRRALCR | |
| | LSQAGARVKIMDDEEFAYCWENFVYSEGQPFMPWYKFDDNYAFLHRTLKEILRNPMEAMYPHIFYFHF | |
| | KNLRKAYGRNESWLCFTMEVVKHHSPVSWKRGVFRNQVDPETHCHAERCFLSWFCDDILSPNTNYEVT | |
| | WYTSWSPCPECAGEVAEFLARHSNVNLTIFTARLYYFWDTDYQEGLRSLSQEGASVEIMGYKDFKYCW | |
| | ENFVYNDDEPFKPWKGLKYNFLFLDSKLQEILE | |
| Human APOBEC- | MNPQIRNPMERMYRDTFYDNFENEPILYGRSYTWLCYEVKIKRGRSNLLWDTGVFRGQVYFKPQYHAE | 104 |
| 3B | MCFLSWFCGNQLPAYKCFQITWFVSWTPCPDCVAKLAEFLSEHPNVTLTISAARLYYYWERDYRRALC | |
| | RLSQAGARVTIMDYEEFAYCWENFVYNEGQQFMPWYKFDENYAFLHRTLKEILRYLMDPDTFTFNFNN | |
| | DPLVLRRRQTYLCYEVERLDNGTWVLMDQHMGFLCNEAKNLLCGFYGRHAELRFLDLVPSLQLDPAQI | |
| | YRVTWFISWSPCFSWGCAGEVRAFLQENTHVRLRIFAARIYDYDPLYKEALQMLRDAGAQVSIMTYDE | |
| | FEYCWDTFVYRQGCPFQPWDGLEEHSQALSGRLRAILQNQGN | |
| Rat APOBEC-3B | MQPQGLGPNAGMGPVCLGCSHRRPYSPIRNPLKKLYQQTFYFHFKNVRYAWGRKNNFLCYEVNGMDCA | 105 |
| | LPVPLRQGVFRKQGHIHAELCFIYWFHDKVLRVLSPMEEFKVTWYMSWSPCSKCAEQVARFLAAHRNL | |
| | SLAIFSSRLYYYLRNPNYQQKLCRLIQEGVHVAAMDLPEFKKCWNKFVDNDGQPFRPWMRLRINFSFY | |
| | DCKLQEIFSRMNLLREDVFYLQFNNSHRVKPVQNRYYRRKSYLCYQLERANGQEPLKGYLLYKKGEQH | |
| | VEILFLEKMRSMELSQVRITCYLTWSPCPNCARQLAAFKKDHPDLILRIYTSRLYFYWRKKFQKGLCT | |
| | LWRSGIHVDVMDLPQFADCWTNFVNPQRPFRPWNELEKNSWRIQRRLRRIKESWGL | |
| Bovine APOBEC- | DGWEVAFRSGTVLKAGVLGVSMTEGWAGSGHPGQGACVWTPGTRNTMNLLREVLFKQQFGNQPRVPAP | 106 |
| 3B | YYRRKTYLCYQLKQRNDLTLDRGCFRNKKQRHAEIRFIDKINSLDLNPSQSYKIICYITWSPCPNCAN | |
| | ELVNFITRNNHLKLEIFASRLYFHWIKSFKMGLQDLQNAGISVAVMTHTEFEDCWEQFVDNQSRPFQP | |
| | WDKLEQYSASIRRRLQRILTAPI | |
| Chimpanzee | MNPQIRNPMEWMYQRTFYYNFENEPILYGRSYTWLCYEVKIRRGHSNLLWDTGVFRGQMYSQPEHHAE | 107 |
| APOBEC-3B | MCFLSWFCGNQLSAYKCFQITWFVSWTPCPDCVAKLAKFLAEHPNVTLTISAARLYYYWERDYRRALC | |
| | RLSQAGARVKIMDDEEFAYCWENFVYNEGQPFMPWYKFDDNYAFLHRTLKEIIRHLMDPDTFTFNFNN | |
| | DPLVLRRHQTYLCYEVERLDNGTWVLMDQHMGFLCNEAKNLLCGFYGRHAELRFLDLVPSLQLDPAQI | |
| | YRVTWFISWSPCFSWGCAGQVRAFLQENTHVRLRIFAARIYDYDPLYKEALQMLRDAGAQVSIMTYDE | |
| | FEYCWDTFVYRQGCPFQPWDGLEEHSQALSGRLRAILQVRASSLCMVPHRPPPPPQSPGPCLPLCSEP | |
| | PLGSLLPTGRPAPSLPFLLTASFSFPPPASLPPLPSLSLSPGHLPVPSFHSLTSCSIQPPCSSRIRET | |
| | EGWASVSKEGRDLG | |
| Human APOBEC- | MNPQIRNPMKAMYPGTFYFQFKNLWEANDRNETWLCFTVEGIKRRSVVSWKTGVFRNQVDSETHCHAE | 108 |
| 3C | RCFLSWFCDDILSPNTKYQVTWYTSWSPCPDCAGEVAEFLARHSNVNLTIFTARLYYFQYPCYQEGLR | |
| | SLSQEGVAVEIMDYEDFKYCWENFVYNDNEPFKPWKGLKTNFRLLKRRLRESLQ | |
| Gorilla | MNPQIRNPMKAMYPGTFYFQFKNLWEANDRNETWLCFTVEGIKRRSVVSWKTGVFRNQVDSETHCHAE | 109 |
| APOBEC3C | RCFLSWFCDDILSPNTNYQVTWYTSWSPCPECAGEVAEFLARHSNVNLTIFTARLYYFQDTDYQEGLR | |
| | SLSQEGVAVKIMDYKDFKYCWENFVYNDDEPFKPWKGLKYNFRFLKRRLQEILE | |
| Human APOBEC- | MEASPASGPRHLMDPHIFTSNFNNGIGRHKTYLCYEVERLDNGTSVKMDQHRGFLHNQAKNLLCGFYG | 110 |
| 3A | RHAELRFLDLVPSLQLDPAQIYRVTWFISWSPCFSWGCAGEVRAFLQENTHVRLRIFAARIYDYDPLY | |
| | KEALQMLRDAGAQVSIMTYDEFKHCWDTFVDHQGCPFQPWDGLDEHSQALSGRLRAILQNQGN | |
| Rhesus macaque | MDGSPASRPRHLMDPNTFTFNFNNDLSVRGRHQTYLCYEVERLDNGTWVPMDERRGFLCNKAKNVPCG | 111 |
| APOBEC-3A | DYGCHVELRFLCEVPSWQLDPAQTYRVTWFISWSPCFRRGCAGQVRVFLQENKHVRLRIFAARIYDYD | |
| | PLYQEALRTLRDAGAQVSIMTYEEFKHCWDTFVDRQGRPFQPWDGLDEHSQALSGRLRAILQNQGN | |
| Bovine APOBEC- | MDEYTFTENFNNQGWPSKTYLCYEMERLDGDATIPLDEYKGFVRNKGLDQPEKPCHAELYFLGKIHSW | 112 |
| 3A | NLDRNQHYRLTCFISWSPCYDCAQKLTTFLKENHHISLHILASRIYTHNRFGCHQSGLCELQAAGARI | |
| | TIMTFEDFKHCWETFVDHKGKPFQPWEGLNVKSQALCTELQAILKTQQN | |
| Human APOBEC- | MALLTAETFRLQFNNKRRLRRPYYPRKALLCYQLTPQNGSTPTRGYFENKKKCHAEICFINEIKSMGL | 113 |
| 3H | DETQCYQVTCYLTWSPCSSCAWELVDFIKAHDHLNLGIFASRLYYHWCKPQQKGLRLLCGSQVPVEVM | |
| | GFPKFADCWENFVDHEKPLSFNPYKMLEELDKNSRAIKRRLERIKIPGVRAQGRYMDILCDAEV | |
| Rhesus macaque | MALLTAKTFSLQFNNKRRVNKPYYPRKALLCYQLTPQNGSTPTRGHLKNKKKDHAEIRFINKIKSMGL | 114 |
| APOBEC-3H | DETQCYQVTCYLTWSPCPSCAGELVDFIKAHRHLNLRIFASRLYYHWRPNYQEGLLLLCGSQVPVEVM | |
| | GLPEFTDCWENFVDHKEPPSFNPSEKLEELDKNSQAIKRRLERIKSRSVDVLENGLRSLQLGPVTPSS | |
| | SIRNSR | |
| Human APOBEC- | MNPQIRNPMERMYRDTFYDNFENEPILYGRSYTWLCYEVKIKRGRSNLLWDTGVFRGPVLPKRQSNHR | 115 |
| 3D | QEVYFRFENHAEMCFLSWFCGNRLPANRRFQITWFVSWNPCLPCVVKVTKFLAEHPNVTLTISAARLY | |
| | YYRDRDWRWVLLRLHKAGARVKIMDYEDFAYCWENFVCNEGQPFMPWYKFDDNYASLHRTLKEILRNP | |
| | MEAMYPHIFYFHFKNLLKACGRNESWLCFTMEVTKHHSAVFRKRGVFRNQVDPETHCHAERCFLSWFC | |
| | DDILSPNTNYEVTWYTSWSPCPECAGEVAEFLARHSNVNLTIFTARLCYFWDTDYQEGLCSLSQEGAS | |
| | VKIMGYKDFVSCWKNFVYSDDEPFKPWKGLQTNFRLLKRRLREILQ | |
| Human APOBEC-1 | MTSEKGPSTGDPTLRRRIEPWEFDVFYDPRELRKEACLLYEIKWGMSRKIWRSSGKNTTNHVEVNFIK | 116 |
| | KFTSERDFHPSMSCSITWFLSWSPCWECSQAIREFLSRHPGVTLVIYVARLFWHMDQQNRQGLRDLVN | |
| | SGVTIQIMRASEYYHCWRNFVNYPPGDEAHWPQYPPLWMMLYALELHCIILSLPPCLKISRRWQNHLT | |
| | FFRLHLQNCHYQTIPPHILLATGLIHPSVAWR | |
| Mouse APOBEC-1 | MSSETGPVAVDPTLRRRIEPHEFEVFFDPRELRKETCLLYEINWGGRHSVWRHTSQNTSNHVEVNFLE | 117 |
| | KFTTERYFRPNTRCSITWFLSWSPCGECSRAITEFLSRHPYVTLFIYIARLYHHTDQRNRQGLRDLIS | |
| | SGVTIQIMTEQEYCYCWRNFVNYPPSNEAYWPRYPHLWVKLYVLELYCIILGLPPCLKILRRKQPQLT | |
| | FFTITLQTCHYQRIPPHLLWATGLK | |
| Rat APOBEC-1 | MSSETGPVAVDPTLRRRIEPHEFEVFFDPRELRKETCLLYEINWGGRHSIWRHTSQNTNKHVEVNFIE | 118 |
| | KFTTERYFCPNTRCSITWFLSWSPCGECSRAITEFLSRYPHVTLFIYIARLYHHADPRNRQGLRDLIS | |
| | SGVTIQIMTEQESGYCWRNFVNYSPSNEAHWPRYPHLWVRLYVLELYCIILGLPPCLNILRRKQPQLT | |
| | FFTIALQSCHYQRLPPHILWATGLK | |
| Human APOBEC-2 | MAQKEEAAVATEAASQNGEDLENLDDPEKLKELIELPPFEIVTGERLPANFFKFQFRNVEYSSGRNKT | 119 |
| | FLCYVVEAQGKGGQVQASRGYLEDEHAAAHAEEAFFNTILPAFDPALRYNVTWYVSSSPCAACADRII | |
| | KTLSKTKNLRLLILVGRLFMWEEPEIQAALKKLKEAGCKLRIMKPQDFEYVWQNFVEQEEGESKAFQP | |
| | WEDIQENFLYYEEKLADILK | |
| Mouse APOBEC-2 | MAQKEEAAEAAAPASQNGDDLENLEDPEKLKELIDLPPFEIVTGVRLPVNFFKFQFRNVEYSSGRNKT | 120 |
| | FLCYVVEVQSKGGQAQATQGYLEDEHAGAHAEEAFFNTILPAFDPALKYNVTWYVSSSPCAACADRIL | |
| | KTLSKTKNLRLLILVSRLFMWEEPEVQAALKKLKEAGCKLRIMKPQDFEYIWQNFVEQEEGESKAFEP | |
| | WEDIQENFLYYEEKLADILK | |
| Rat APOBEC-2 | MAQKEEAAEAAAPASQNGDDLENLEDPEKLKELIDLPPFEIVTGVRLPVNFFKFQFRNVEYSSGRNKT | 121 |
| | FLCYVVEAQSKGGQVQATQGYLEDEHAGAHAEEAFFNTILPAFDPALKYNVTWYVSSSPCAACADRIL | |
| | KTLSKTKNLRLLILVSRLFMWEEPEVQAALKKLKEAGCKLRIMKPQDFEYLWQNFVEQEEGESKAFEP | |
| | WEDIQENFLYYEEKLADILK | |
| Bovine APOBEC- | MAQKEEAAAAAEPASQNGEEVENLEDPEKLKELIELPPFEIVTGERLPAHYFKFQFRNVEYSSGRNKT | 122 |
| 2 | FLCYVVEAQSKGGQVQASRGYLEDEHATNHAEEAFFNSIMPTFDPALRYMVTWYVSSSPCAACADRIV | |
| | KTLNKTKNLRLLILVGRLFMWEEPEIQAALRKLKEAGCRLRIMKPQDFEYIWQNFVEQEEGESKAFEP | |
| | WEDIQENFLYYEEKLADILK | |
| Petromyzon | MTDAEYVRIHEKLDIYTFKKQFFNNKKSVSHRCYVLFELKRRGERRACFWGYAVNKPQSGTERGIHAE | 123 |
| marinus CDA1 | IFSIRKVEEYLRDNPGQFTINWYSSWSPCADCAEKILEWYNQELRGNGHTLKIWACKLYYEKNARNQI | |
| (pmCDA1) | GLWNLRDNGVGLNVMVSEHYQCCRKIFIQSSHNQLNENRWLEKTLKRAEKRRSELSIMIQVKILHTTK | |
| | SPAV | |
| Human APOBEC3G | MKPHFRNTVERMYRDTFSYNFYNRPILSRRNTVWLCYEVKTKGPSRPPLDAKIFRGQVYSELKYHPEM | 124 |
| D316R_D317R | RFFHWFSKWRKLHRDQEYEVTWYISWSPCTKCTRDMATFLAEDPKVTLTIFVARLYYFWDPDYQEALR | |
| | SLCQKRDGPRATMKIMNYDEFQHCWSKFVYSQRELFEPWNNLPKYYILLHIMLGEILRHSMDPPTFTF | |
| | NFNNEPWVRGRHETYLCYEVERMHNDTWVLLNQRRGFLCNQAPHKHGFLEGRHAELCFLDVIPFWKLD | |
| | LDQDYRVTCFTSWSPCFSCAQEMAKFISKNKHVSLCIFTARIYRRQGRCQEGLRTLAEAGAKISIMTY | |
| | SEFKHCWDTFVDHQGCPFQPWDGLDEHSQDLSGRLRAILQNQEN | |
| Human APOBEC3G | MDPPTFTFNFNNEPWVRGRHETYLCYEVERMHNDTWVLLNQRRGFLCNQAPHKHGFLEGRHAELCFLD | 125 |
| chain A | VIPFWKLDLDQDYRVTCFTSWSPCFSCAQEMAKFISKNKHVSLCIFTARIYDDQGRCQEGLRTLAEAG | |
| | AKISIMTYSEFKHCWDTFVDHQGCPFQPWDGLDEHSQDLSGRLRAILQ | |
| Human APOBEC3G | MDPPTFTFNFNNEPWVRGRHETYLCYEVERMHNDTWVLLNQRRGFLCNQAPHKHGFLEGRHAELCFLD | 126 |
| chain A | VIPFWKLDLDQDYRVTCFTSWSPCFSCAQEMAKFISKNKHVSLCIFTARIYRRQGRCQEGLRTLAEAG | |
| D120R D121R | AKISIMTYSEFKHCWDTFVDHQGCPFQPWDGLDEHSQDLSGRLRAILQ | |
| FERNY | MFERNYDPRELRKETYLLYEIKWGKSGKLWRHWCQNNRTQHAEVYFLENIFNARRFNPSTHCSITWYL | 127 |
| | SWSPCAECSQKIVDFLKEHPNVNLEIYVARLYYHEDERNRQGLRDLVNSGVTIRIMDLPDYNYCWKTF | |
| | VSDQGGDEDYWPGHFAPWIKQYSLKL | |
| evoFERNY | MFERNYDPRELRKETYLLYEIKWGKSGKLWRHWCQNNRTQHAEVYFLENIFNARRFNPSTHCSITWYL | 128 |
| | SWSPCAECSQKIVDFLKEHPNVNLEIYVARLYYPENERNRQGLRDLVNSGVTIRIMDLPDYNYCWKTF | |
| | VSDQGGDEDYWPGHFAPWIKQYSLKL | |
| Rat APOBEC-1 | MSSETGPVAVDPTLRRRIEPHEFEVFFDPRELRKETCLLYEINWGGRHSIWRHTSQNTNKHVEVNFIE | 129 |
| | KFTTERYFCPNTRCSITWFLSWSPCGECSRAITEFLSRYPHVTLFIYIARLYHHADPRNRQGLRDLIS | |
| | SGVTIQIMTEQESGYCWRNFVNYSPSNEAHWPRYPHLWVRLYVLELYCIILGLPPCLNILRRKQPQLT | |
| | FFTIALQSCHYQRLPPHILWATGLK | |
| evoAPOBEC | MSSKTGPVAVDPTLRRRIEPHEFEVFFDPRELRKETCLLYEINWGGRHSIWRHTSQNTNKHVEVNFIE | 130 |
| | KFTTERYFCPNTRCSITWFLSWSPCGECSRAITEFLSRYPNVTLFIYIARLYHLANPRNRQGLRDLIS | |
| | SGVTIQIMTEQESGYCWHNFVNYSPSNESHWPRYPHLWVRLYVLELYCIILGLPPCLNILRRKQSQLT | |
| | SFTIALQSCHYQRLPPHILWATGLK | |
| Petromyzon | MTDAEYVRIHEKLDIYTFKKQFFNNKKSVSHRCYVLFELKRRGERRACFWGYAVNKPQSGTERGIHAE | 131 |
| marinus CDA1 | IFSIRKVEEYLRDNPGQFTINWYSSWSPCADCAEKILEWYNQELRGNGHTLKIWACKLYYEKNARNQI | |
| | GLWNLRDNGVGLNVMVSEHYQCCRKIFIQSSHNQLNENRWLEKTLKRAEKRRSELSIMIQVKILHTTK | |
| | SPAV | |
| evoCDA | MTDAEYVRIHEKLDIYTFKKQFSNNKKSVSHRCYVLFELKRRGERRACFWGYAVNKPQSGTERGIHAE | 132 |
| | IFSIRKVEEYLRDNPGQFTINWYSSWSPCADCAEKILEWYNQELRGNGHTLKIWVCKLYYEKNARNQI | |
| | GLWNLRDNGVGLNVMVSEHYQCCRKIFIQSSHNQLNENRWLEKTLKRAEKRRSELSIMFQVKILHTTK | |
| | SPAV | |
| Anc689 APOBEC | MSSETGPVAVDPTLRRRIEPHEFEVFFDPRELRKETCLLYEIKWGTSHKIWRHSSKNTTKHVEVNFIE | 133 |
| | KFTSERHFCPSTSCSITWFLSWSPCGECSKAITEFLSQHPNVTLVIYVARLYHHMDQQNRQGLRDLVN | |
| | SGVTIQIMTAPEYDYCWRNFVNYPPGKEAHWPRYPPLWMKLYALELHAGILGLPPCLNILRRKQPQLT | |
| | FFTIALQSCHYQRLPPHILWATGLK | |
| evoAnc68 9 | MSSKTGPVAVDPTLRRRIEPHEFEVFFDPRELRKETCLLYEIKWGTSHKIWRHSSKNTTKHVEVNFIE | 134 |
| APOBEC | KFTSERHFCPSTSCSITWFLSWSPCGECSKAITEFLSQHPNVTLVIYVARLYHLMNQQNRQGLRDLVN | |
| | SGVTIQIMTAPEYDYCWHNFVNYPPGKESHWPRYPPLWMKLYALELHAGILGLPPCLNILRRKQSQLT | |
| | SFTIALQSCHYQRLPPHILWATGLK | |

Linkers

| | | SEQ ID |
|---|---|---|
| DESCRIPTION | SEQUENCE | NO: |
| linker | (G)n | 135 |
| linker | (XP)n | 136 |
| linker | (GGS)n | 137 |
| linker | (SGGS) | 138 |
| linker | (SGGS)n | 139 |
| linker | (GGGS)n | 140 |
| linker | (GGGGS)n | 141 |
| linker | (EAAAK)n | 142 |
| XTEN linker | (SGSETPGTSESATPES) | 143 |
| (SGGS)2-XTEN- | (SGGS)2-SGSETPGTSESATPES-(SGGS)2 | 144 |
| (SGGS)2 linker | | |
| linker | (SGGS)nSGSETPGTSESATPES(SGGS)n | 145 |
| linker | (SGGSSGGSSGSETPGTSESATPES) | 146 |
| linker | (SGGSSGGSSGSETPGTSESATPESSGGSSGGS) | 147 |
| linker | (SGGSSGGSSGSETPGTSESATPESSGGSSGGSSGGSSGGS) | 148 |
| linker | (SGGSSGGSSGSETPGTSESATPESSGGSSGGSSGGSSGGSSGSETPGTSESATPESSGGSSGGS) | 149 |
| linker | (PGSPAGSPTSTEEGTSESATPESGPGTSTEPSEGSAPGSPAGSPTSTEEGTSTEPSEGSAPGTSTEP | 150 |
| | SEGSAPGTSESATPESGPGSEPATS) | |
| linker | (GGSGGSPGSPAGSPTSTEEGTSESATPESGPGTSTEPSEGSAPGSPAGSPTSTEEGTSTEPSEGSAP | 151 |
| | GTSTEPSEGSAPGTSESATPESGPGSEPATSGGSGGS) | |

NLS

| | | SEQ ID |
|---|---|---|
| DESCRIPTION | SEQUENCE | NO: |
| NLS of SV40 | PKKKRKV | 152 |
| large T-Ag | | |
| NLS of polyoma | VSRKRPRP | 153 |
| large T-Ag | | |
| NLS of TUS- | KLKIKRPVK | 155 |
| protein | | |
| NLS of c-MYC | PAAKRVKLD | 154 |
| NLS of | EGAPPAKRAR | 156 |
| Hepatitis D | | |
| virus antigen | | |
| NLS of murine | PPQPKKKPLDGE | 157 |
| p53 | | |
| NLS | MKRTADGSEFESPKKKRKV | 158 |
| NLS of | AVKRPAATKKAGQAKKKKLD | 159 |
| nucleoplasmin | | |
| NLS | SGGSKRTADGSEFEPKKKRKV | 160 |
| NLS of EGL-13 | MSRRRKANPTKLSENAKKLAKEVEN | 161 |
| NLS | MDSLLMNRRKFLYQFKNVRWAKGRRETYLC | 162 |

UGI

| | | SEQ ID |
|---|---|---|
| DESCRIPTION | SEQUENCE | NO: |
| UGI- | MTNLSDIIEKETGKQLVIQESILMLPEEVEEVIGNKPESDILVHTAYDESTD | 163 |
| sp\|P14739\|UNGI | ENVMLLTSDAPEYKPWALVIQDSNGENKIKML | |
| BPPB2 | | |

Intein

| | | SEQ ID |
|---|---|---|
| DESCRIPTION | SEQUENCE | NO: |
| 2-4 intein | CLAEGTRIFDPVTGTTHRIEDVVDGRKPIHVVAAAKDGTLLARPVVSWFDQGTRDVIGLRIAGGAIVW | 164 |
| | ATPDHKVLTEYGWRAAGELRKGDRVAGPGGSGNSLALSLTADQMVSALLDAEPP1LYSEYDPTSPFSE | |
| | ASMMGLLTNLADRELVHMINWAKRVPGFVDLTLHDQAHLLECAWLEILMIGLVWRSMEHPGKLLFAPN | |
| | LLLDRNQGKCVEGMVEIFDMLLATSSRFRMMNLQGEEFVCLKSIILLNSGVYTFLSSTLKSLEEKDHI | |
| | HRALDKITDTLIHLMAKAGLTLQQQHQRLAQLLLILSHIRHMSNKGMEHLYSMKYKNVVPLYDLLLEM | |
| | LDAHRLHAGGSGASRVQAFADALDDKFLHDMLAEELRYSVIREVLPTRRARTFDLEVEELHTLVAEGV | |
| | WHNC | |
| 3-2 intein | CLAEGTRIFDPVTGTTHRIEDVVDGRKPIHVVAVAKDGTLLARPVVSWFDQGTRDVIGLRIAGGAIVW | 165 |
| | ATPDHKVLTEYGWRAAGELRKGDRVAGPGGSGNSLALSLTADQMVSALLDAEPPILYSEYDPTSPFSE | |
| | ASMMGLLTNLADRELVHMINWAKRVPGFVDLTLHDQAHLLECAWLEILMIGLVWRSMEHPGKLLFAPN | |
| | LLLDRNQGKCVEGMVEIFDMLLATSSRFRMMNLQGEEFVCLKSIILLNSGVYTFLSSTLKSLEEKDHI | |
| | HRALDKITDTLIHLMAKAGLTLQQQHQRLAQLLLILSHIRHMSNKGMEHLYSMKYTNVVPLYDLLLEM | |
| | LDAHRLHAGGSGASRVQAFADALDDKFLHDMLAEELRYSVIREVLPTRRARTFDLEVEELHTLVAEGV | |
| | WHNC | |
| 30R3-1 intein | CLAEGTRIFDPVTGTTHRIEDVVDGRKPIHVVAAAKDGTLLARPVVSWFDQGTRDVIGLRIAGGATVW | 166 |
| | ATPDHKVLTEYGWRAAGELRKGDRVAGPGGSGNSLALSLTADQMVSALLDAEPPIPYSEYDPTSPFSE | |
| | ASMMGLLTNLADRELVHMINWAKRVPGFVDLTLHDQAHLLECAWLEILMIGLVWRSMEHPGKLLFAPN | |
| | LLLDRNQGKCVEGMVEIFDMLLATSSRFRMMNLQGEEFVCLKSIILLNSGVYTFLSSTLKSLEEKDHI | |
| | HRALDKITDTLIHLMAKAGLTLQQQHQRLAQLLLILSHIRHMSNKGMEHLYSMKYKNVVPLYDLLLEM | |
| | LDAHRLHAGGSGASRVQAFADALDDKFLHDMLAEGLRYSVIREVLPTRRARTFDLEVEELHTLVAEGV | |
| | WHNC | |
| 30R3-2 intein | CLAEGTRIFDPVTGTTHRIEDVVDGRKPIHVVAAAKDGTLLARPVVSWFDQGTRDVIGLRIAGGATVW | 167 |
| | ATPDHKVLTEYGWRAAGELRKGDRVAGPGGSGNSLALSLTADQMVSALLDAEPPILYSEYDPTSPFSE | |
| | ASMMGLLTNLADRELVHMINWAKRVPGFVDLTLHDQAHLLECAWLEILMIGLVWRSMEHPGKLLFAPN | |
| | LLLDRNQGKCVEGMVEIFDMLLATSSRFRMMNLQGEEFVCLKSIILLNSGVYTFLSSTLKSLEEKDHI | |
| | HRALDKITDTLIHLMAKAGLTLQQQHQRLAQLLLILSHIRHMSNKGMEHLYSMKYKNVVPLYDLLLEM | |
| | LDAHRLHAGGSGASRVQAFADALDDKFLHDMLAEELRYSVIREVLPTRRARTFDLEVEELHTLVAEGV | |
| | WHNC | |
| 30R3-3 intein | CLAEGTRIFDPVTGTTHRIEDVVDGRKPIHVVAAAKDGTLLARPVVSWFDQGTRDVIGLRIAGGATVW | 168 |
| | ATPDHKVLTEYGWRAAGELRKGDRVAGPGGSGNSLALSLTADQMVSALLDAEPPIPYSEYDPTSPFSE | |
| | ASMMGLLTNLADRELVHMINWAKRVPGFVDLTLHDQAHLLECAWLEILMIGLVWRSMEHPGKLLFAPN | |
| | LLLDRNQGKCVEGMVEIFDMLLATSSRFRMMNLQGEEFVCLKSIILLNSGVYTFLSSTLKSLEEKDHI | |
| | HRALDKITDTLIHLMAKAGLTLQQQHQRLAQLLLILSHIRHMSNKGMEHLYSMKYKNVVPLYDLLLEM | |
| | LDAHRLHAGGSGASRVQAFADALDDKFLHDMLAEELRYSVIREVLPTRRARTFDLEVEELHTLVAEGV | |
| | WHNC | |
| 37R3-1 intein | CLAEGTRIFDPVTGTTHRIEDVVDGRKPIHVVAAAKDGTLLARPVVSWFDQGTRDVIGLRIAGGATVW | 169 |
| | ATPDHKVLTEYGWRAAGELRKGDRVAGPGGSGNSLALSLTADQMVSALLDAEPPILYSEYNPTSPFSE | |
| | ASMMGLLTNLADRELVHMINWAKRVPGFVDLTLHDQAHLLERAWLEILMIGLVWRSMEHPGKLLFAPN | |
| | LLLDRNQGKCVEGMVEIFDMLLATSSRFRMMNLQGEEFVCLKSIILLNSGVYTFLSSTLKSLEEKDHI | |
| | HRALDKITDTLIHLMAKAGLTLQQQHQRLAQLLLILSHIRHMSNKGMEHLYSMKYKNVVPLYDLLLEM | |
| | LDAHRLHAGGSGASRVQAFADALDDKFLHDMLAEGLRYSVIREVLPTRRARTFDLEVEELHTLVAEGV | |
| | WHNC | |
| 37R3-2 intein | CLAEGTRIFDPVTGTTHRIEDVVDGRKPIHVVAAAKDGTLLARPVVSWFDQGTRDVIGLRIAGGAIVW | 170 |
| | ATPDHKVLTEYGWRAAGELRKGDRVAGPGGSGNSLALSLTADQMVSALLDAEPPILYSEYDPTSPFSE | |
| | ASMMGLLTNLADRELVHMINWAKRVPGFVDLTLHDQAHLLERAWLEILMIGLVWRSMEHPGKLLFAPN | |
| | LLLDRNQGKCVEGMVEIFDMLLATSSRFRMMNLQGEEFVCLKSIILLNSGVYTFLSSTLKSLEEKDHI | |
| | HRALDKITDTLIHLMAKAGLTLQQQHQRLAQLLLILSHIRHMSNKGMEHLYSMKYKNVVPLYDLLLEM | |
| | LDAHRLHAGGSGASRVQAFADALDDKFLHDMLAEGLRYSVIREVLPTRRARTFDLEVEELHTLVAEGV | |
| | WHNC | |
| 37R3-3 intein | CLAEGTRIFDPVTGTTHRIEDVVDGRKPIHVVAVAKDGTLLARPVVSWFDQGTRDVIGLRIAGGATVW | 171 |
| | ATPDHKVLTEYGWRAAGELRKGDRVAGPGGSGNSLALSLTADQMVSALLDAEPPILYSEYDPTSPFSE | |
| | ASMMGLLTNLADRELVHMINWAKRVPGFVDLTLHDQAHLLERAWLEILMIGLVWRSMEHPGKLLFAPN | |
| | LLLDRNQGKCVEGMVEIFDMLLATSSRFRMMNLQGEEFVCLKSIILLNSGVYTFLSSTLKSLEEKDHI | |
| | HRALDKITDTLIHLMAKAGLTLQQQHQRLAQLLLILSHIRHMSNKGMEHLYSMKYKNVVPLYDLLLEM | |
| | LDAHRLHAGGSGASRVQAFADALDDKFLHDMLAEELRYSVIREVLPTRRARTFDLEVEELHTLVAEGV | |
| | WHNC | |

RNA-protein recruitment system

| | | SEQ ID |
|---|---|---|
| DESCRIPTION | SEQUENCE | NO: |
| MS2 hairpin or | GCCAACATGAGGATCACCCATGTCTGCAGGGCC | 172 |
| aptamer | | |
| MCP or MS2cp | GSASNFTQFVLVDNGGTGDVTVAPSNFANGVAEWISSNSRSQAYKVTCSVRQSSAQNRKYTIKVEVPK | 173 |
| | VATQTVGGEELPVAGWRSYLNMELTIPIFATNSDCELIVKAMQGLLKDGNPIPSAIAANSGIY | |

ABEs (adenosine base editors)

| | | SEQ ID |
|---|---|---|
| DESCRIPTION | SEQUENCE | NO: |
| ecTadA(wt)- | MSEVEFSHEYWMRHALTLAKRAWDEREVPVGAVLVHNNRVIGEGWNRPIGRHDPTAHAEIMALRQGGL | 174 |
| XTEN-nCas9-NLS | VMQNYRLIDATLYVTLEPCVMCAGAMIHSRIGRVVFGARDAKTGAAGSLMDVLHHPGMNHRVEITEGI | |
| | LADECAALLSDFFRMRRQEIKAQKKAQSSTDSGSETPGTSESATPESDKKYSIGLAIGTNSVGWAVIT | |
| | DEYKVPSKKFKVLGNTDRHSIKKNLIGALLFDSGETAEATRLKRTARRRYTRRKNRICYLQEIFSNEM | |
| | AKVDDSFFHRLEESFLVEEDKKHERHPIFGNIVDEVAYHEKYPTIYHLRKKLVDSTDKADLRLIYLAL | |
| | AHMIKFRGHFLIEGDLNPDNSDVDKLFIQLVQTYNQLFEENPINASGVDAKAILSARLSKSRRLENLI | |
| | AQLPGEKKNGLFGNLIALSLGLTPNFKSNFDLAEDAKLQLSKDTYDDDLDNLLAQIGDQYADLFLAAK | |
| | NLSDAILLSDILRVNTEITKAPLSASMIKRYDEHHQDLTLLKALVRQQLPEKYKEIFFDQSKNGYAGY | |
| | IDGGASQEEFYKFIKPILEKMDGTEELLVKLNREDLLRKQRTFDNGSIPHQIHLGELHAILRRQEDFY | |
| | PFLKDNREKIEKILTFRIPYYVGPLARGNSRFAWMTRKSEETITPWNFEEVVDKGASAQSFIERMTNF | |
| | DKNLPNEKVLPKHSLLYEYFTVYNELTKVKYVTEGMRKPAFLSGEQKKAIVDLLFKTNRKVTVKQLKE | |
| | DYFKKIECFDSVEISGVEDRFNASLGTYHDLLKIIKDKDFLDNEENEDILEDIVLTLTLFEDREMIEE | |
| | RLKTYAHLFDDKVMKQLKRRRYTGWGRLSRKLINGIRDKQSGKTILDFLKSDGFANRNFMQLIHDDSL | |
| | TFKEDIQKAQVSGQGDSLHEHIANLAGSPAIKKGILQTVKVVDELVKVMGRHKPENIVIEMARENQTT | |
| | QKGQKNSRERMKRIEEGIKELGSQILKEHPVENTQLQNEKLYLYYLQNGRDMYVDQELDINRLSDYDV | |
| | DHIVPQSFLKDDSIDNKVLTRSDKNRGKSDNVPSEEVVKKMKNYWRQLLNAKLITQRKFDNLTKAERG | |
| | GLSELDKAGFIKRQLVETRQITKHVAQILDSRMNTKYDENDKLIREVKVITLKSKLVSDFRKDFQFYK | |
| | VREINNYHHAHDAYLNAVVGTALIKKYPKLESEFVYGDYKVYDVRKMIAKSEQEIGKATAKYFFYSNI | |
| | MNFFKTEITLANGEIRKRPLIETNGETGEIVWDKGRDFATVRKVLSMPQVNIVKKTEVQTGGFSKESI | |
| | LPKRNSDKLIARKKDWDPKKYGGFDSPTVAYSVLVVAKVEKGKSKKLKSVKELLGITIMERSSFEKNP | |
| | IDFLEAKGYKEVKKDLIIKLPKYSLFELENGRKRMLASAGELQKGNELALPSKYVNFLYLASHYEKLK | |
| | GSPEDNEQKQLFVEQHKHYLDEIIEQISEFSKRVILADANLDKVLSAYNKHRDKPIREQAENIIHLFT | |
| | LTNLGAPAAFKYFDTTIDRKRYTSTKEVLDATLIHQSITGLYETRIDLSQLGGDSGGSPKKKRKV | |
| ecTadA(D108N)- | MSEVEFSHEYWMRHALTLAKRAWDEREVPVGAVLVHNNRVIGEGWNRPIGRHDPTAHAEIMALRQGGL | 175 |
| XTEN-nCas9-NLS | VMQNYRLIDATLYVTLEPCVMCAGAMIHSRIGRVVFGARNAKTGAAGSLMDVLHHPGMNHRVEITEGI | |
| | LADECAALLSDFFRMRRQEIKAQKKAQSSTDSGSETPGTSESATPESDKKYSIGLAIGTNSVGWAVIT | |
| | DEYKVPSKKFKVLGNTDRHSIKKNLIGALLFDSGETAEATRLKRTARRRYTRRKNRICYLQEIFSNEM | |
| | AKVDDSFFHRLEESFLVEEDKKHERHPIFGNIVDEVAYHEKYPTIYHLRKKLVDSTDKADLRLIYLAL | |
| | AHMIKFRGHFLIEGDLNPDNSDVDKLFIQLVQTYNQLFEENPINASGVDAKAILSARLSKSRRLENLI | |
| | AQLPGEKKNGLFGNLIALSLGLTPNFKSNFDLAEDAKLQLSKDTYDDDLDNLLAQIGDQYADLFLAAK | |
| | NLSDAILLSDILRVNTEITKAPLSASMIKRYDEHHQDLTLLKALVRQQLPEKYKEIFFDQSKNGYAGY | |
| | IDGGASQEEFYKFIKPILEKMDGTEELLVKLNREDLLRKQRTFDNGSIPHQIHLGELHAILRRQEDFY | |
| | PFLKDNREKIEKILTFRIPYYVGPLARGNSRFAWMTRKSEETITPWNFEEVVDKGASAQSFIERMTNF | |
| | DKNLPNEKVLPKHSLLYEYFTVYNELTKVKYVTEGMRKPAFLSGEQKKAIVDLLFKTNRKVTVKQLKE | |
| | DYFKKIECFDSVEISGVEDRFNASLGTYHDLLKIIKDKDFLDNEENEDILEDIVLTLTLFEDREMIEE | |
| | RLKTYAHLFDDKVMKQLKRRRYTGWGRLSRKLINGIRDKQSGKTILDFLKSDGFANRNFMQLIHDDSL | |
| | TFKEDIQKAQVSGQGDSLHEHIANLAGSPAIKKGILQTVKVVDELVKVMGRHKPENIVIEMARENQTT | |
| | QKGQKNSRERMKRIEEGIKELGSQILKEHPVENTQLQNEKLYLYYLQNGRDMYVDQELDINRLSDYDV | |
| | DHIVPQSFLKDDSIDNKVLTRSDKNRGKSDNVPSEEVVKKMKNYWRQLLNAKLITQRKFDNLTKAERG | |
| | GLSELDKAGFIKRQLVETRQITKHVAQILDSRMNTKYDENDKLIREVKVITLKSKLVSDFRKDFQFYK | |
| | VREINNYHHAHDAYLNAVVGTALIKKYPKLESEFVYGDYKVYDVRKMIAKSEQEIGKATAKYFFYSNI | |
| | MNFFKTEITLANGEIRKRPLIETNGETGEIVWDKGRDFATVRKVLSMPQVNIVKKTEVQTGGFSKESI | |
| | LPKRNSDKLIARKKDWDPKKYGGFDSPTVAYSVLVVAKVEKGKSKKLKSVKELLGITIMERSSFEKNP | |
| | IDFLEAKGYKEVKKDLIIKLPKYSLFELENGRKRMLASAGELQKGNELALPSKYVNFLYLASHYEKLK | |
| | GSPEDNEQKQLFVEQHKHYLDEIIEQISEFSKRVILADANLDKVLSAYNKHRDKPIREQAENIIHLFT | |
| | LTNLGAPAAFKYFDTTIDRKRYTSTKEVLDATLIHQSITGLYETRIDLSQLGGDSGGSPKKKRKV | |
| ecTadA(D108G)- | MSEVEFSHEYWMRHALTLAKRAWDEREVPVGAVLVHNNRVIGEGWNRPIGRHDPTAHAEIMALRQGGL | 176 |
| XTEN-nCas9-NLS | VMQNYRLIDATLYVTLEPCVMCAGAMIHSRIGRVVFGARGAKTGAAGSLMDVLHHPGMNHRVEITEGI | |
| | LADECAALLSDFFRMRRQEIKAQKKAQSSTDSGSETPGTSESATPESDKKYSIGLAIGTNSVGWAVIT | |
| | DEYKVPSKKFKVLGNTDRHSIKKNLIGALLFDSGETAEATRLKRTARRRYTRRKNRICYLQEIFSNEM | |
| | AKVDDSFFHRLEESFLVEEDKKHERHPIFGNIVDEVAYHEKYPTIYHLRKKLVDSTDKADLRLIYLAL | |
| | AHMIKFRGHFLIEGDLNPDNSDVDKLFIQLVQTYNQLFEENPINASGVDAKAILSARLSKSRRLENLI | |
| | AQLPGEKKNGLFGNLIALSLGLTPNFKSNFDLAEDAKLQLSKDTYDDDLDNLLAQIGDQYADLFLAAK | |
| | NLSDAILLSDILRVNTEITKAPLSASMIKRYDEHHQDLTLLKALVRQQLPEKYKEIFFDQSKNGYAGY | |
| | IDGGASQEEFYKFIKPILEKMDGTEELLVKLNREDLLRKQRTFDNGSIPHQIHLGELHAILRRQEDFY | |
| | PFLKDNREKIEKILTFRIPYYVGPLARGNSRFAWMTRKSEETITPWNFEEVVDKGASAQSFIERMTNF | |
| | DKNLPNEKVLPKHSLLYEYFTVYNELTKVKYVTEGMRKPAFLSGEQKKAIVDLLFKTNRKVTVKQLKE | |
| | DYFKKIECFDSVEISGVEDRFNASLGTYHDLLKIIKDKDFLDNEENEDILEDIVLTLTLFEDREMIEE | |
| | RLKTYAHLFDDKVMKQLKRRRYTGWGRLSRKLINGIRDKQSGKTILDFLKSDGFANRNFMQLIHDDSL | |
| | TFKEDIQKAQVSGQGDSLHEHIANLAGSPAIKKGILQTVKVVDELVKVMGRHKPENIVIEMARENQTT | |
| | QKGQKNSRERMKRIEEGIKELGSQILKEHPVENTQLQNEKLYLYYLQNGRDMYVDQELDINRLSDYDV | |
| | DHIVPQSFLKDDSIDNKVLTRSDKNRGKSDNVPSEEVVKKMKNYWRQLLNAKLITQRKFDNLTKAERG | |
| | GLSELDKAGFIKRQLVETRQITKHVAQILDSRMNTKYDENDKLIREVKVITLKSKLVSDFRKDFQFYK | |
| | VREINNYHHAHDAYLNAVVGTALIKKYPKLESEFVYGDYKVYDVRKMIAKSEQEIGKATAKYFFYSNI | |
| | MNFFKTEITLANGEIRKRPLIETNGETGEIVWDKGRDFATVRKVLSMPQVNIVKKTEVQTGGFSKESI | |
| | LPKRNSDKLIARKKDWDPKKYGGFDSPTVAYSVLVVAKVEKGKSKKLKSVKELLGITIMERSSFEKNP | |
| | IDFLEAKGYKEVKKDLIIKLPKYSLFELENGRKRMLASAGELQKGNELALPSKYVNFLYLASHYEKLK | |
| | GSPEDNEQKQLFVEQHKHYLDEIIEQISEFSKRVILADANLDKVLSAYNKHRDKPIREQAENIIHLFT | |
| | LTNLGAPAAFKYFDTTIDRKRYTSTKEVLDATLIHQSITGLYETRIDLSQLGGDSGGSPKKKRKV | |
| ecTadA(D108V)- | MSEVEFSHEYWMRHALTLAKRAWDEREVPVGAVLVHNNRVIGEGWNRPIGRHDPTAHAEIMALRQGGL | 177 |
| XTEN-nCas9-NLS | VMQNYRLIDATLYVTLEPCVMCAGAMIHSRIGRVVFGARVAKTGAAGSLMDVLHHPGMNHRVEITEGI | |
| | LADECAALLSDFFRMRRQEIKAQKKAQSSTDSGSETPGTSESATPESDKKYSIGLAIGTNSVGWAVIT | |
| | DEYKVPSKKFKVLGNTDRHSIKKNLIGALLFDSGETAEATRLKRTARRRYTRRKNRICYLQEIFSNEM | |
| | AKVDDSFFHRLEESFLVEEDKKHERHPIFGNIVDEVAYHEKYPTIYHLRKKLVDSTDKADLRLIYLAL | |
| | AHMIKFRGHFLIEGDLNPDNSDVDKLFIQLVQTYNQLFEENPINASGVDAKAILSARLSKSRRLENLI | |
| | AQLPGEKKNGLFGNLIALSLGLTPNFKSNFDLAEDAKLQLSKDTYDDDLDNLLAQIGDQYADLFLAAK | |
| | NLSDAILLSDILRVNTEITKAPLSASMIKRYDEHHQDLTLLKALVRQQLPEKYKEIFFDQSKNGYAGY | |
| | IDGGASQEEFYKFIKPILEKMDGTEELLVKLNREDLLRKQRTFDNGSIPHQIHLGELHAILRRQEDFY | |
| | PFLKDNREKIEKILTFRIPYYVGPLARGNSRFAWMTRKSEETITPWNFEEVVDKGASAQSFIERMTNF | |
| | DKNLPNEKVLPKHSLLYEYFTVYNELTKVKYVTEGMRKPAFLSGEQKKAIVDLLFKTNRKVTVKQLKE | |
| | DYFKKIECFDSVEISGVEDRFNASLGTYHDLLKIIKDKDFLDNEENEDILEDIVLTLTLFEDREMIEE | |
| | RLKTYAHLFDDKVMKQLKRRRYTGWGRLSRKLINGIRDKQSGKTILDFLKSDGFANRNFMQLIHDDSL | |
| | TFKEDIQKAQVSGQGDSLHEHIANLAGSPAIKKGILQTVKVVDELVKVMGRHKPENIVIEMARENQTT | |
| | QKGQKNSRERMKRIEEGIKELGSQILKEHPVENTQLQNEKLYLYYLQNGRDMYVDQELDINRLSDYDV | |
| | DHIVPQSFLKDDSIDNKVLTRSDKNRGKSDNVPSEEVVKKMKNYWRQLLNAKLITQRKFDNLTKAERG | |
| | GLSELDKAGFIKRQLVETRQITKHVAQILDSRMNTKYDENDKLIREVKVITLKSKLVSDFRKDFQFYK | |
| | VREINNYHHAHDAYLNAVVGTALIKKYPKLESEFVYGDYKVYDVRKMIAKSEQEIGKATAKYFFYSNI | |
| | MNFFKTEITLANGEIRKRPLIETNGETGEIVWDKGRDFATVRKVLSMPQVNIVKKTEVQTGGFSKESI | |
| | LPKRNSDKLIARKKDWDPKKYGGFDSPTVAYSVLVVAKVEKGKSKKLKSVKELLGITIMERSSFEKNP | |
| | IDFLEAKGYKEVKKDLIIKLPKYSLFELENGRKRMLASAGELQKGNELALPSKYVNFLYLASHYEKLK | |
| | GSPEDNEQKQLFVEQHKHYLDEIIEQISEFSKRVILADANLDKVLSAYNKHRDKPIREQAENIIHLFT | |
| | LTNLGAPAAFKYFDTTIDRKRYTSTKEVLDATLIHQSITGLYETRIDLSQLGGDSGGSPKKKRKV | |
| ecTadA(H8Y_ | MSEVEFSYEYWMRHALTLAKRAWDEREVPVGAVLVHNNRVIGEGWNRPIGRHDPTAHAEIMALRQGGL | 178 |
| D108N_N127S)- | VMQNYRLIDATLYVTLEPCVMCAGAMIHSRIGRVVFGARNAKTGAAGSLMDVLHHPGMSHRVEITEGI | |
| XTEN-dCas9 | LADECAALLSDFFRMRRQEIKAQKKAQSSTDSGSETPGTSESATPESDKKYSIGLAIGTNSVGWAVIT | |
| | DEYKVPSKKFKVLGNTDRHSIKKNLIGALLFDSGETAEATRLKRTARRRYTRRKNRICYLQEIFSNEM | |
| | AKVDDSFFHRLEESFLVEEDKKHERHPIFGNIVDEVAYHEKYPTIYHLRKKLVDSTDKADLRLIYLAL | |
| | AHMIKFRGHFLIEGDLNPDNSDVDKLFIQLVQTYNQLFEENPINASGVDAKAILSARLSKSRRLENLI | |
| | AQLPGEKKNGLFGNLIALSLGLTPNFKSNFDLAEDAKLQLSKDTYDDDLDNLLAQIGDQYADLFLAAK | |
| | NLSDAILLSDILRVNTEITKAPLSASMIKRYDEHHQDLTLLKALVRQQLPEKYKEIFFDQSKNGYAGY | |
| | IDGGASQEEFYKFIKPILEKMDGTEELLVKLNREDLLRKQRTFDNGSIPHQIHLGELHAILRRQEDFY | |
| | PFLKDNREKIEKILTFRIPYYVGPLARGNSRFAWMTRKSEETITPWNFEEVVDKGASAQSFIERMTNF | |
| | DKNLPNEKVLPKHSLLYEYFTVYNELTKVKYVTEGMRKPAFLSGEQKKAIVDLLFKTNRKVTVKQLKE | |
| | DYFKKIECFDSVEISGVEDRFNASLGTYHDLLKIIKDKDFLDNEENEDILEDIVLTLTLFEDREMIEE | |
| | RLKTYAHLFDDKVMKQLKRRRYTGWGRLSRKLINGIRDKQSGKTILDFLKSDGFANRNFMQLIHDDSL | |
| | TFKEDIQKAQVSGQGDSLHEHIANLAGSPAIKKGILQTVKVVDELVKVMGRHKPENIVIEMARENQTT | |
| | QKGQKNSRERMKRIEEGIKELGSQILKEHPVENTQLQNEKLYLYYLQNGRDMYVDQELDINRLSDYDV | |
| | DAIVPQSFLKDDSIDNKVLTRSDKNRGKSDNVPSEEVVKKMKNYWRQLLNAKLITQRKFDNLTKAERG | |
| | GLSELDKAGFIKRQLVETRQITKHVAQILDSRMNTKYDENDKLIREVKVITLKSKLVSDFRKDFQFYK | |
| | VREINNYHHAHDAYLNAVVGTALIKKYPKLESEFVYGDYKVYDVRKMIAKSEQEIGKATAKYFFYSNI | |
| | MNFFKTEITLANGEIRKRPLIETNGETGEIVWDKGRDFATVRKVLSMPQVNIVKKTEVQTGGFSKESI | |
| | LPKRNSDKLIARKKDWDPKKYGGFDSPTVAYSVLVVAKVEKGKSKKLKSVKELLGITIMERSSFEKNP | |
| | IDFLEAKGYKEVKKDLIIKLPKYSLFELENGRKRMLASAGELQKGNELALPSKYVNFLYLASHYEKLK | |
| | GSPEDNEQKQLFVEQHKHYLDEIIEQISEFSKRVILADANLDKVLSAYNKHRDKPIREQAENIIHLFT | |
| | LTNLGAPAAFKYFDTTIDRKRYTSTKEVLDATLIHQSITGLYETRIDLSQLGGD | |
| (H8Y_D108N_ | MSEVEFSYEYWMRHALTLAKRAWDEREVPVGAVLVHNNRVIGEGWNRPIGRHDPTAHAEIMALRQGGL | 179 |
| N127S_E155X)- | VMQNYRLIDATLYVTLEPCVMCAGAMIHSRIGRVVFGARNAKTGAAGSLMDVLHHPGMSHRVEITEGI | |
| XTEN-dCas9; | LADECAALLSDFFRMRRQXIKAQKKAQSSTDSGSETPGTSESATPESDKKYSIGLAIGTNSVGWAVIT | |
| X = D, G or V | DEYKVPSKKFKVLGNTDRHSIKKNLIGALLFDSGETAEATRLKRTARRRYTRRKNRICYLQEIFSNEM | |
| | AKVDDSFFHRLEESFLVEEDKKHERHPIFGNIVDEVAYHEKYPTIYHLRKKLVDSTDKADLRLIYLAL | |
| | AHMIKFRGHFLIEGDLNPDNSDVDKLFIQLVQTYNQLFEENPINASGVDAKAILSARLSKSRRLENLI | |
| | AQLPGEKKNGLFGNLIALSLGLTPNFKSNFDLAEDAKLQLSKDTYDDDLDNLLAQIGDQYADLFLAAK | |
| | NLSDAILLSDILRVNTEITKAPLSASMIKRYDEHHQDLTLLKALVRQQLPEKYKEIFFDQSKNGYAGY | |
| | IDGGASQEEFYKFIKPILEKMDGTEELLVKLNREDLLRKQRTFDNGSIPHQIHLGELHAILRRQEDFY | |
| | PFLKDNREKIEKILTFRIPYYVGPLARGNSRFAWMTRKSEETITPWNFEEVVDKGASAQSFIERMTNF | |
| | DKNLPNEKVLPKHSLLYEYFTVYNELTKVKYVTEGMRKPAFLSGEQKKAIVDLLFKTNRKVTVKQLKE | |
| | DYFKKIECFDSVEISGVEDRFNASLGTYHDLLKIIKDKDFLDNEENEDILEDIVLTLTLFEDREMIEE | |
| | RLKTYAHLFDDKVMKQLKRRRYTGWGRLSRKLINGIRDKQSGKTILDFLKSDGFANRNFMQLIHDDSL | |
| | TFKEDIQKAQVSGQGDSLHEHIANLAGSPAIKKGILQTVKVVDELVKVMGRHKPENIVIEMARENQTT | |
| | QKGQKNSRERMKRIEEGIKELGSQILKEHPVENTQLQNEKLYLYYLQNGRDMYVDQELDINRLSDYDV | |
| | DAIVPQSFLKDDSIDNKVLTRSDKNRGKSDNVPSEEVVKKMKNYWRQLLNAKLITQRKFDNLTKAERG | |
| | GLSELDKAGFIKRQLVETRQITKHVAQILDSRMNTKYDENDKLIREVKVITLKSKLVSDFRKDFQFYK | |
| | VREINNYHHAHDAYLNAVVGTALIKKYPKLESEFVYGDYKVYDVRKMIAKSEQEIGKATAKYFFYSNI | |
| | MNFFKTEITLANGEIRKRPLIETNGETGEIVWDKGRDFATVRKVLSMPQVNIVKKTEVQTGGFSKESI | |
| | LPKRNSDKLIARKKDWDPKKYGGFDSPTVAYSVLVVAKVEKGKSKKLKSVKELLGITIMERSSFEKNP | |
| | IDFLEAKGYKEVKKDLIIKLPKYSLFELENGRKRMLASAGELQKGNELALPSKYVNFLYLASHYEKLK | |
| | GSPEDNEQKQLFVEQHKHYLDEIIEQISEFSKRVILADANLDKVLSAYNKHRDKPIREQAENIIHLFT | |
| | LTNLGAPAAFKYFDTTIDRKRYTSTKEVLDATLIHQSITGLYETRIDLSQLGGD | |
| ABE7.7 | MSEVEFSHEYWMRHALTLAKRAWDEREVPVGAVLVHNNRVIGEGWNRPIGRHDPTAHAEIMALRQGGL | 180 |
| | VMQNYRLIDATLYVTLEPCVMCAGAMIHSRIGRVVFGARDAKTGAAGSLMDVLHHPGMNHRVEITEGI | |
| | LADECAALLSDFFRMRRQEIKAQKKAQSSTDSGGSSGGSSGSETPGTSESATPESSGGSSGGSSEVEF | |
| | SHEYWMRHALTLAKRALDEREVPVGAVLVLNNRVIGEGWNRAIGLHDPTAHAEIMALRQGGLVMQNYR | |
| | LIDATLYVTFEPCVMCAGAMIHSRIGRVVFGVRNAKTGAAGSLMDVLHYPGMNHRVEITEGILADECA | |
| | ALLCYFFRMPRQVFNAQKKAQSSTDSGGSSGGSSGSETPGTSESATPESSGGSSGGSDKKYSIGLAIG | |
| | TNSVGWAVITDEYKVPSKKFKVLGNTDRHSIKKNLIGALLFDSGETAEATRLKRTARRRYTRRKNRIC | |
| | YLQEIFSNEMAKVDDSFFHRLEESFLVEEDKKHERHPIFGNIVDEVAYHEKYPTIYHLRKKLVDSTDK | |
| | ADLRLIYLALAHMIKFRGHFLIEGDLNPDNSDVDKLFIQLVQTYNQLFEENPINASGVDAKAILSARL | |
| | SKSRRLENLIAQLPGEKKNGLFGNLIALSLGLTPNFKSNFDLAEDAKLQLSKDTYDDDLDNLLAQIGD | |
| | QYADLFLAAKNLSDAILLSDILRVNTEITKAPLSASMIKRYDEHHQDLTLLKALVRQQLPEKYKEIFF | |
| | DQSKNGYAGYIDGGASQEEFYKFIKPILEKMDGTEELLVKLNREDLLRKQRTFDNGSIPHQIHLGELH | |
| | AILRRQEDFYPFLKDNREKIEKILTFRIPYYVGPLARGNSRFAWMTRKSEETITPWNFEEVVDKGASA | |
| | QSFIERMTNFDKNLPNEKVLPKHSLLYEYFTVYNELTKVKYVTEGMRKPAFLSGEQKKAIVDLLFKTN | |
| | RKVTVKQLKEDYFKKIECFDSVEISGVEDRFNASLGTYHDLLKIIKDKDFLDNEENEDILEDIVLTLT | |
| | LFEDREMIEERLKTYAHLFDDKVMKQLKRRRYTGWGRLSRKLINGIRDKQSGKTILDFLKSDGFANRN | |
| | FMQLIHDDSLTFKEDIQKAQVSGQGDSLHEHIANLAGSPAIKKGILQTVKVVDELVKVMGRHKPENIV | |
| | IEMARENQTTQKGQKNSRERMKRIEEGIKELGSQILKEHPVENTQLQNEKLYLYYLQNGRDMYVDQEL | |
| | DINRLSDYDVDHIVPQSFLKDDSIDNKVLTRSDKNRGKSDNVPSEEVVKKMKNYWRQLLNAKLITQRK | |
| | FDNLTKAERGGLSELDKAGFIKRQLVETRQITKHVAQILDSRMNTKYDENDKLIREVKVITLKSKLVS | |
| | DFRKDFQFYKVREINNYHHAHDAYLNAVVGTALIKKYPKLESEFVYGDYKVYDVRKMIAKSEQEIGKA | |
| | TAKYFFYSNIMNFFKTEITLANGEIRKRPLIETNGETGEIVWDKGRDFATVRKVLSMPQVNIVKKTEV | |
| | QTGGFSKESILPKRNSDKLIARKKDWDPKKYGGFDSPTVAYSVLVVAKVEKGKSKKLKSVKELLGITI | |
| | MERSSFEKNPIDFLEAKGYKEVKKDLIIKLPKYSLFELENGRKRMLASAGELQKGNELALPSKYVNFL | |
| | YLASHYEKLKGSPEDNEQKQLFVEQHKHYLDEIIEQISEFSKRVILADANLDKVLSAYNKHRDKPIRE | |
| | QAENIIHLFTLTNLGAPAAFKYFDTTIDRKRYTSTKEVLDATLIHQSITGLYETRIDLSQLGGDSGGS | |
| | PKKKRKV | |
| pNMG-624 | MSEVEFSHEYWMRHALTLAKRAWDEREVPVGAVLVHNNRVIGEGWNRPIGRHDPTAHAEIMALRQGGL | 181 |
| | VMQNYRLIDATLYVTLEPCVMCAGAMIHSRIGRVVFGARDAKTGAAGSLMDVLHHPGMNHRVEITEGI | |
| | LADECAALLSDFFRMRRQEIKAQKKAQSSTDSGGSSGGSSGSETPGTSESATPESSGGSSGGSSEVEF | |
| | SHEYWMRHALTLAKRARDEREVPVGAVLVLNNRVIGEGWNRAIGLHDPTAHAEIMALRQGGLVMQNYR | |
| | LIDATLYVTFEPCVMCAGAMIHSRIGRVVFGVRNAKTGAAGSLMDVLHYPGMNHRVEITEGILADECA | |
| | ALLCYFFRMPRQVFNAQKKAQSSTDSGGSSGGSSGSETPGTSESATPESDKKYSIGLAIGTNSVGWAV | |
| | ITDEYKVPSKKFKVLGNTDRHSIKKNLIGALLFDSGETAEATRLKRTARRRYTRRKNRICYLQEIFSN | |
| | EMAKVDDSFFHRLEESFLVEEDKKHERHPIFGNIVDEVAYHEKYPTIYHLRKKLVDSTDKADLRLIYL | |
| | ALAHMIKFRGHFLIEGDLNPDNSDVDKLFIQLVQTYNQLFEENPINASGVDAKAILSARLSKSRRLEN | |
| | LIAQLPGEKKNGLFGNLIALSLGLTPNFKSNFDLAEDAKLQLSKDTYDDDLDNLLAQIGDQYADLFLA | |
| | AKNLSDAILLSDILRVNTEITKAPLSASMIKRYDEHHQDLTLLKALVRQQLPEKYKEIFFDQSKNGYA | |
| | GYIDGGASQEEFYKFIKPILEKMDGTEELLVKLNREDLLRKQRTFDNGSIPHQIHLGELHAILRRQED | |
| | FYPFLKDNREKIEKILTFRIPYYVGPLARGNSRFAWMTRKSEETITPWNFEEVVDKGASAQSFIERMT | |
| | NFDKNLPNEKVLPKHSLLYEYFTVYNELTKVKYVTEGMRKPAFLSGEQKKAIVDLLFKTNRKVTVKQL | |
| | KEDYFKKIECFDSVEISGVEDRFNASLGTYHDLLKIIKDKDFLDNEENEDILEDIVLTLTLFEDREMI | |
| | EERLKTYAHLFDDKVMKQLKRRRYTGWGRLSRKLINGIRDKQSGKTILDFLKSDGFANRNFMQLIHDD | |
| | SLTFKEDIQKAQVSGQGDSLHEHIANLAGSPAIKKGILQTVKVVDELVKVMGRHKPENIVIEMARENQ | |
| | TTQKGQKNSRERMKRIEEGIKELGSQILKEHPVENTQLQNEKLYLYYLQNGRDMYVDQELDINRLSDY | |
| | DVDHIVPQSFLKDDSIDNKVLTRSDKNRGKSDNVPSEEVVKKMKNYWRQLLNAKLITQRKFDNLTKAE | |
| | RGGLSELDKAGFIKRQLVETRQITKHVAQILDSRMNTKYDENDKLIREVKVITLKSKLVSDFRKDFQF | |
| | YKVREINNYHHAHDAYLNAVVGTALIKKYPKLESEFVYGDYKVYDVRKMIAKSEQEIGKATAKYFFYS | |
| | NIMNFFKTEITLANGEIRKRPLIETNGETGEIVWDKGRDFATVRKVLSMPQVNIVKKTEVQTGGFSKE | |
| | SILPKRNSDKLIARKKDWDPKKYGGFDSPTVAYSVLVVAKVEKGKSKKLKSVKELLGITIMERSSFEK | |
| | NPIDFLEAKGYKEVKKDLIIKLPKYSLFELENGRKRMLASAGELQKGNELALPSKYVNFLYLASHYEK | |
| | LKGSPEDNEQKQLFVEQHKHYLDEIIEQISEFSKRVILADANLDKVLSAYNKHRDKPIREQAENIIHL | |
| | FTLTNLGAPAAFKYFDTTIDRKRYTSTKEVLDATLIHQSITGLYETRIDLSQLGGDSGGSPKKKRKV | |
| ABE3.2 | MSEVEFSHEYWMRHALTLAKRAWDEREVPVGAVLVHNNRVIGEGWNRPIGRHDPTAHAEIMALRQGGL | 182 |
| | VMQNYRLIDATLYVTLEPCVMCAGAMIHSRIGRVVFGARDAKTGAAGSLMDVLHHPGMNHRVEITEGI | |
| | LADECAALLSDFFRMRRQEIKAQKKAQSSTDSGGSSGGSSGSETPGTSESATPESSGGSSGGSSEVEF | |
| | SHEYWMRHALTLAKRAWDEREVPVGAVLVHNNRVIGEGWNRPIGRHDPTAHAEIMALRQGGLVMQNYR | |
| | LIDATLYVTFEPCVMCAGAMIHSRIGRVVFGVRNAKTGAAGSLMDVLHYPGMNHRVEITEGILADECA | |
| | ALLSYFFRMRRQVFKAQKKAQSSTDSGGSSGGSSGSETPGTSESATPESSGGSSGGSDKKYSIGLAIG | |
| | TNSVGWAVITDEYKVPSKKFKVLGNTDRHSIKKNLIGALLFDSGETAEATRLKRTARRRYTRRKNRIC | |
| | YLQEIFSNEMAKVDDSFFHRLEESFLVEEDKKHERHPIFGNIVDEVAYHEKYPTIYHLRKKLVDSTDK | |
| | ADLRLIYLALAHMIKFRGHFLIEGDLNPDNSDVDKLFIQLVQTYNQLFEENPINASGVDAKAILSARL | |
| | SKSRRLENLIAQLPGEKKNGLFGNLIALSLGLTPNFKSNFDLAEDAKLQLSKDTYDDDLDNLLAQIGD | |
| | QYADLFLAAKNLSDAILLSDILRVNTEITKAPLSASMIKRYDEHHQDLTLLKALVRQQLPEKYKEIFF | |
| | DQSKNGYAGYIDGGASQEEFYKFIKPILEKMDGTEELLVKLNREDLLRKQRTFDNGSIPHQIHLGELH | |
| | AILRRQEDFYPFLKDNREKIEKILTFRIPYYVGPLARGNSRFAWMTRKSEETITPWNFEEVVDKGASA | |
| | QSFIERMTNFDKNLPNEKVLPKHSLLYEYFTVYNELTKVKYVTEGMRKPAFLSGEQKKAIVDLLFKTN | |
| | RKVTVKQLKEDYFKKIECFDSVEISGVEDRFNASLGTYHDLLKIIKDKDFLDNEENEDILEDIVLTLT | |
| | LFEDREMIEERLKTYAHLFDDKVMKQLKRRRYTGWGRLSRKLINGIRDKQSGKTILDFLKSDGFANRN | |
| | FMQLIHDDSLTFKEDIQKAQVSGQGDSLHEHIANLAGSPAIKKGILQTVKVVDELVKVMGRHKPENIV | |
| | IEMARENQTTQKGQKNSRERMKRIEEGIKELGSQILKEHPVENTQLQNEKLYLYYLQNGRDMYVDQEL | |
| | DINRLSDYDVDHIVPQSFLKDDSIDNKVLTRSDKNRGKSDNVPSEEVVKKMKNYWRQLLNAKLITQRK | |
| | FDNLTKAERGGLSELDKAGFIKRQLVETRQITKHVAQILDSRMNTKYDENDKLIREVKVITLKSKLVS | |
| | DFRKDFQFYKVREINNYHHAHDAYLNAVVGTALIKKYPKLESEFVYGDYKVYDVRKMIAKSEQEIGKA | |
| | TAKYFFYSNIMNFFKTEITLANGEIRKRPLIETNGETGEIVWDKGRDFATVRKVLSMPQVNIVKKTEV | |
| | QTGGFSKESILPKRNSDKLIARKKDWDPKKYGGFDSPTVAYSVLVVAKVEKGKSKKLKSVKELLGITI | |
| | MERSSFEKNPIDFLEAKGYKEVKKDLIIKLPKYSLFELENGRKRMLASAGELQKGNELALPSKYVNFL | |
| | YLASHYEKLKGSPEDNEQKQLFVEQHKHYLDEIIEQISEFSKRVILADANLDKVLSAYNKHRDKPIRE | |
| | QAENIIHLFTLTNLGAPAAFKYFDTTIDRKRYTSTKEVLDATLIHQSITGLYETRIDLSQLGGDSGGS | |
| | PKKKRKV | |
| ABE5.3 | MSEVEFSHEYWMRHALTLAKRAWDEREVPVGAVLVHNNRVIGEGWNRPIGRHDPTAHAEIMALRQGGL | 183 |
| | VMQNYRLIDATLYVTLEPCVMCAGAMIHSRIGRVVFGARDAKTGAAGSLMDVLHHPGMNHRVEITEGI | |
| | LADECAALLSDFFRMRRQEIKAQKKAQSSTDSGGSSGGSSGSETPGTSESATPESSGGSSGGSSEVEF | |
| | SHEYWMRHALTLAKRAWDEREVPVGAVLVLNNRVIGEGWNRPIGLHDPTAHAEIMALRQGGLVMQNYR | |
| | LIDATLYVTFEPCVMCAGAMIHSRIGRVVFGVRNAKTGAAGSLMDVLHYPGMNHRVEITEGILADECA | |
| | ALLCYFFRMRRQVFNAQKKAQSSTDSGGSSGGSSGSETPGTSESATPESSGGSSGGSDKKYSIGLAIG | |
| | TNSVGWAVITDEYKVPSKKFKVLGNTDRHSIKKNLIGALLFDSGETAEATRLKRTARRRYTRRKNRIC | |
| | YLQEIFSNEMAKVDDSFFHRLEESFLVEEDKKHERHPIFGNIVDEVAYHEKYPTIYHLRKKLVDSTDK | |
| | ADLRLIYLALAHMIKFRGHFLIEGDLNPDNSDVDKLFIQLVQTYNQLFEENPINASGVDAKAILSARL | |
| | SKSRRLENLIAQLPGEKKNGLFGNLIALSLGLTPNFKSNFDLAEDAKLQLSKDTYDDDLDNLLAQIGD | |
| | QYADLFLAAKNLSDAILLSDILRVNTEITKAPLSASMIKRYDEHHQDLTLLKALVRQQLPEKYKEIFF | |
| | DQSKNGYAGYIDGGASQEEFYKFIKPILEKMDGTEELLVKLNREDLLRKQRTFDNGSIPHQIHLGELH | |
| | AILRRQEDFYPFLKDNREKIEKILTFRIPYYVGPLARGNSRFAWMTRKSEETITPWNFEEVVDKGASA | |
| | QSFIERMTNFDKNLPNEKVLPKHSLLYEYFTVYNELTKVKYVTEGMRKPAFLSGEQKKAIVDLLFKTN | |
| | RKVTVKQLKEDYFKKIECFDSVEISGVEDRFNASLGTYHDLLKIIKDKDFLDNEENEDILEDIVLTLT | |
| | LFEDREMIEERLKTYAHLFDDKVMKQLKRRRYTGWGRLSRKLINGIRDKQSGKTILDFLKSDGFANRN | |
| | FMQLIHDDSLTFKEDIQKAQVSGQGDSLHEHIANLAGSPAIKKGILQTVKVVDELVKVMGRHKPENIV | |
| | IEMARENQTTQKGQKNSRERMKRIEEGIKELGSQILKEHPVENTQLQNEKLYLYYLQNGRDMYVDQEL | |
| | DINRLSDYDVDHIVPQSFLKDDSIDNKVLTRSDKNRGKSDNVPSEEVVKKMKNYWRQLLNAKLITQRK | |
| | FDNLTKAERGGLSELDKAGFIKRQLVETRQITKHVAQILDSRMNTKYDENDKLIREVKVITLKSKLVS | |
| | DFRKDFQFYKVREINNYHHAHDAYLNAVVGTALIKKYPKLESEFVYGDYKVYDVRKMIAKSEQEIGKA | |
| | TAKYFFYSNIMNFFKTEITLANGEIRKRPLIETNGETGEIVWDKGRDFATVRKVLSMPQVNIVKKTEV | |
| | QTGGFSKESILPKRNSDKLIARKKDWDPKKYGGFDSPTVAYSVLVVAKVEKGKSKKLKSVKELLGITI | |
| | MERSSFEKNPIDFLEAKGYKEVKKDLIIKLPKYSLFELENGRKRMLASAGELQKGNELALPSKYVNFL | |
| | YLASHYEKLKGSPEDNEQKQLFVEQHKHYLDEIIEQISEFSKRVILADANLDKVLSAYNKHRDKPIRE | |
| | QAENIIHLFTLTNLGAPAAFKYFDTTIDRKRYTSTKEVLDATLIHQSITGLYETRIDLSQLGGDSGGS | |
| | PKKKRKV | |
| pNMG-558 | MSEVEFSHEYWMRHALTLAKRAWDEREVPVGAVLVHNNRVIGEGWNRPIGRHDPTAHAEIMALRQGGL | 184 |
| | VMQNYRLIDATLYVTLEPCVMCAGAMIHSRIGRVVFGARDAKTGAAGSLMDVLHHPGMNHRVEITEGI | |
| | LADECAALLSDFFRMRRQEIKAQKKAQSSTDSGGSSGGSSGSETPGTSESATPESSGGSSGGSSEVEF | |
| | SHEYWMRHALTLAKRAWDEREVPVGAVLVLNNRVIGEGWNRPIGLHDPTAHAEIMALRQGGLVMQNYR | |
| | LIDATLYVTFEPCVMCAGAMIHSRIGRVVFGVRNAKTGAAGSLMDVLHYPGMNHRVEITEGILADECA | |
| | ALLCYFFRMRRQVFNAQKKAQSSTDSGGSSGGSSGSETPGTSESATPESDKKYSIGLAIGTNSVGWAV | |
| | ITDEYKVPSKKFKVLGNTDRHSIKKNLIGALLFDSGETAEATRLKRTARRRYTRRKNRICYLQEIFSN | |
| | EMAKVDDSFFHRLEESFLVEEDKKHERHPIFGNIVDEVAYHEKYPTIYHLRKKLVDSTDKADLRLIYL | |
| | ALAHMIKFRGHFLIEGDLNPDNSDVDKLFIQLVQTYNQLFEENPINASGVDAKAILSARLSKSRRLEN | |
| | LIAQLPGEKKNGLFGNLIALSLGLTPNFKSNFDLAEDAKLQLSKDTYDDDLDNLLAQIGDQYADLFLA | |
| | AKNLSDAILLSDILRVNTEITKAPLSASMIKRYDEHHQDLTLLKALVRQQLPEKYKEIFFDQSKNGYA | |
| | GYIDGGASQEEFYKFIKPILEKMDGTEELLVKLNREDLLRKQRTFDNGSIPHQIHLGELHAILRRQED | |
| | FYPFLKDNREKIEKILTFRIPYYVGPLARGNSRFAWMTRKSEETITPWNFEEVVDKGASAQSFIERMT | |
| | NFDKNLPNEKVLPKHSLLYEYFTVYNELTKVKYVTEGMRKPAFLSGEQKKAIVDLLFKTNRKVTVKQL | |
| | KEDYFKKIECFDSVEISGVEDRFNASLGTYHDLLKIIKDKDFLDNEENEDILEDIVLTLTLFEDREMI | |
| | EERLKTYAHLFDDKVMKQLKRRRYTGWGRLSRKLINGIRDKQSGKTILDFLKSDGFANRNFMQLIHDD | |
| | SLTFKEDIQKAQVSGQGDSLHEHIANLAGSPAIKKGILQTVKVVDELVKVMGRHKPENIVIEMARENQ | |
| | TTQKGQKNSRERMKRIEEGIKELGSQILKEHPVENTQLQNEKLYLYYLQNGRDMYVDQELDINRLSDY | |
| | DVDHIVPQSFLKDDSIDNKVLTRSDKNRGKSDNVPSEEVVKKMKNYWRQLLNAKLITQRKFDNLTKAE | |
| | RGGLSELDKAGFIKRQLVETRQITKHVAQILDSRMNTKYDENDKLIREVKVITLKSKLVSDFRKDFQF | |
| | YKVREINNYHHAHDAYLNAVVGTALIKKYPKLESEFVYGDYKVYDVRKMIAKSEQEIGKATAKYFFYS | |
| | NIMNFFKTEITLANGEIRKRPLIETNGETGEIVWDKGRDFATVRKVLSMPQVNIVKKTEVQTGGFSKE | |
| | SILPKRNSDKLIARKKDWDPKKYGGFDSPTVAYSVLVVAKVEKGKSKKLKSVKELLGITIMERSSFEK | |
| | NPIDFLEAKGYKEVKKDLIIKLPKYSLFELENGRKRMLASAGELQKGNELALPSKYVNFLYLASHYEK | |
| | LKGSPEDNEQKQLFVEQHKHYLDEIIEQISEFSKRVILADANLDKVLSAYNKHRDKPIREQAENIIHL | |
| | FTLTNLGAPAAFKYFDTTIDRKRYTSTKEVLDATLIHQSITGLYETRIDLSQLGGDSGGSPKKKRKV | |
| pNMG-576 | MSEVEFSHEYWMRHALTLAKRAWDEREVPVGAVLVHNNRVIGEGWNRPIGRHDPTAHAEIMALRQGGL | 185 |
| | VMQNYRLIDATLYVTLEPCVMCAGAMIHSRIGRVVFGARDAKTGAAGSLMDVLHHPGMNHRVEITEGI | |
| | LADECAALLSDFFRMRRQEIKAQKKAQSSTDSGGSSGGSSGSETPGTSESATPESSGGSSGGSSEVEF | |
| | SHEYWMRHALTLAKRAWDEREVPVGAVLVLNNRVIGEGWNRSIGLHDPTAHAEIMALRQGGLVMQNYR | |
| | LIDATLYVTFEPCVMCAGAMIHSRIGRVVFGVRNAKTGAAGSLMDVLHYPGMNHRVEITEGILADECA | |
| | ALLCYFFRMRRQVFNAQKKAQSSTDSGGSSGGSSGSETPGTSESATPESSGGSSGGSDKKYSIGLAIG | |
| | TNSVGWAVITDEYKVPSKKFKVLGNTDRHSIKKNLIGALLFDSGETAEATRLKRTARRRYTRRKNRIC | |
| | YLQEIFSNEMAKVDDSFFHRLEESFLVEEDKKHERHPIFGNIVDEVAYHEKYPTIYHLRKKLVDSTDK | |
| | ADLRLIYLALAHMIKFRGHFLIEGDLNPDNSDVDKLFIQLVQTYNQLFEENPINASGVDAKAILSARL | |
| | SKSRRLENLIAQLPGEKKNGLFGNLIALSLGLTPNFKSNFDLAEDAKLQLSKDTYDDDLDNLLAQIGD | |
| | QYADLFLAAKNLSDAILLSDILRVNTEITKAPLSASMIKRYDEHHQDLTLLKALVRQQLPEKYKEIFF | |
| | DQSKNGYAGYIDGGASQEEFYKFIKPILEKMDGTEELLVKLNREDLLRKQRTFDNGSIPHQIHLGELH | |
| | AILRRQEDFYPFLKDNREKIEKILTFRIPYYVGPLARGNSRFAWMTRKSEETITPWNFEEVVDKGASA | |
| | QSFIERMTNFDKNLPNEKVLPKHSLLYEYFTVYNELTKVKYVTEGMRKPAFLSGEQKKAIVDLLFKTN | |
| | RKVTVKQLKEDYFKKIECFDSVEISGVEDRFNASLGTYHDLLKIIKDKDFLDNEENEDILEDIVLTLT | |
| | LFEDREMIEERLKTYAHLFDDKVMKQLKRRRYTGWGRLSRKLINGIRDKQSGKTILDFLKSDGFANRN | |
| | FMQLIHDDSLTFKEDIQKAQVSGQGDSLHEHIANLAGSPAIKKGILQTVKVVDELVKVMGRHKPENIV | |
| | IEMARENQTTQKGQKNSRERMKRIEEGIKELGSQILKEHPVENTQLQNEKLYLYYLQNGRDMYVDQEL | |
| | DINRLSDYDVDHIVPQSFLKDDSIDNKVLTRSDKNRGKSDNVPSEEVVKKMKNYWRQLLNAKLITQRK | |
| | FDNLTKAERGGLSELDKAGFIKRQLVETRQITKHVAQILDSRMNTKYDENDKLIREVKVITLKSKLVS | |
| | DFRKDFQFYKVREINNYHHAHDAYLNAVVGTALIKKYPKLESEFVYGDYKVYDVRKMIAKSEQEIGKA | |
| | TAKYFFYSNIMNFFKTEITLANGEIRKRPLIETNGETGEIVWDKGRDFATVRKVLSMPQVNIVKKTEV | |
| | QTGGFSKESILPKRNSDKLIARKKDWDPKKYGGFDSPTVAYSVLVVAKVEKGKSKKLKSVKELLGITI | |
| | MERSSFEKNPIDFLEAKGYKEVKKDLIIKLPKYSLFELENGRKRMLASAGELQKGNELALPSKYVNFL | |
| | YLASHYEKLKGSPEDNEQKQLFVEQHKHYLDEIIEQISEFSKRVILADANLDKVLSAYNKHRDKPIRE | |
| | QAENIIHLFTLTNLGAPAAFKYFDTTIDRKRYTSTKEVLDATLIHQSITGLYETRIDLSQLGGDSGGS | |
| | PKKKRKV | |
| pNMG-577 | MSEVEFSHEYWMRHALTLAKRAWDEREVPVGAVLVHNNRVIGEGWNRPIGRHDPTAHAEIMALRQGGL | 186 |
| | VMQNYRLIDATLYVTLEPCVMCAGAMIHSRIGRVVFGARDAKTGAAGSLMDVLHHPGMNHRVEITEGI | |
| | LADECAALLSDFFRMRRQEIKAQKKAQSSTDSGGSSGGSSGSETPGTSESATPESSGGSSGGSSEVEF | |
| | SHEYWMRHALTLAKRAWDEREVPVGAVLVLNNRVIGEGWNRSIGLHDPTAHAEIMALRQGGLVMQNYR | |
| | LIDATLYVTFEPCVMCAGAMIHSRIGRVVFGVRNAKTGAAGSLMDVLHYPGMNHRVEITEGILADECN | |
| | ALLCYFFRMRRQVFNAQKKAQSSTDSGGSSGGSSGSETPGTSESATPESSGGSSGGSDKKYSIGLAIG | |
| | TNSVGWAVITDEYKVPSKKFKVLGNTDRHSIKKNLIGALLFDSGETAEATRLKRTARRRYTRRKNRIC | |
| | YLQEIFSNEMAKVDDSFFHRLEESFLVEEDKKHERHPIFGNIVDEVAYHEKYPTIYHLRKKLVDSTDK | |
| | ADLRLIYLALAHMIKFRGHFLIEGDLNPDNSDVDKLFIQLVQTYNQLFEENPINASGVDAKAILSARL | |
| | SKSRRLENLIAQLPGEKKNGLFGNLIALSLGLTPNFKSNFDLAEDAKLQLSKDTYDDDLDNLLAQIGD | |
| | QYADLFLAAKNLSDAILLSDILRVNTEITKAPLSASMIKRYDEHHQDLTLLKALVRQQLPEKYKEIFF | |
| | DQSKNGYAGYIDGGASQEEFYKFIKPILEKMDGTEELLVKLNREDLLRKQRTFDNGSIPHQIHLGELH | |
| | AILRRQEDFYPFLKDNREKIEKILTFRIPYYVGPLARGNSRFAWMTRKSEETITPWNFEEVVDKGASA | |
| | QSFIERMTNFDKNLPNEKVLPKHSLLYEYFTVYNELTKVKYVTEGMRKPAFLSGEQKKAIVDLLFKTN | |
| | RKVTVKQLKEDYFKKIECFDSVEISGVEDRFNASLGTYHDLLKIIKDKDFLDNEENEDILEDIVLTLT | |
| | LFEDREMIEERLKTYAHLFDDKVMKQLKRRRYTGWGRLSRKLINGIRDKQSGKTILDFLKSDGFANRN | |
| | FMQLIHDDSLTFKEDIQKAQVSGQGDSLHEHIANLAGSPAIKKGILQTVKVVDELVKVMGRHKPENIV | |
| | IEMARENQTTQKGQKNSRERMKRIEEGIKELGSQILKEHPVENTQLQNEKLYLYYLQNGRDMYVDQEL | |
| | DINRLSDYDVDHIVPQSFLKDDSIDNKVLTRSDKNRGKSDNVPSEEVVKKMKNYWRQLLNAKLITQRK | |
| | FDNLTKAERGGLSELDKAGFIKRQLVETRQITKHVAQILDSRMNTKYDENDKLIREVKVITLKSKLVS | |
| | DFRKDFQFYKVREINNYHHAHDAYLNAVVGTALIKKYPKLESEFVYGDYKVYDVRKMIAKSEQEIGKA | |
| | TAKYFFYSNIMNFFKTEITLANGEIRKRPLIETNGETGEIVWDKGRDFATVRKVLSMPQVNIVKKTEV | |
| | QTGGFSKESILPKRNSDKLIARKKDWDPKKYGGFDSPTVAYSVLVVAKVEKGKSKKLKSVKELLGITI | |
| | MERSSFEKNPIDFLEAKGYKEVKKDLIIKLPKYSLFELENGRKRMLASAGELQKGNELALPSKYVNFL | |
| | YLASHYEKLKGSPEDNEQKQLFVEQHKHYLDEIIEQISEFSKRVILADANLDKVLSAYNKHRDKPIRE | |
| | QAENIIHLFTLTNLGAPAAFKYFDTTIDRKRYTSTKEVLDATLIHQSITGLYETRIDLSQLGGDSGGS | |
| | PKKKRKV | |
| pNMG-586 | MSEVEFSHEYWMRHALTLAKRAWDEREVPVGAVLVHNNRVIGEGWNRPIGRHDPTAHAEIMALRQGGL | 187 |
| | VMQNYRLIDATLYVTLEPCVMCAGAMIHSRIGRVVFGARDAKTGAAGSLMDVLHHPGMNHRVEITEGI | |
| | LADECAALLSDFFRMRRQEIKAQKKAQSSTDSGGSSGGSSGSETPGTSESATPESSGGSSGGSSEVEF | |
| | SHEYWMRHALTLAKRAWDEREVPVGAVLVLNNRVIGEGWNRAIGLHDPTAHAEIMALRQGGLVMQNYR | |
| | LIDATLYVTFEPCVMCAGAMIHSRIGRVVFGVRNAKTGAAGSLMDVLHYPGMNHRVEITEGILADECA | |
| | ALLCYFFRMRRQVFNAQKKAQSSTDSGGSSGGSSGSETPGTSESATPESSGGSSGGSDKKYSIGLAIG | |
| | TNSVGWAVITDEYKVPSKKFKVLGNTDRHSIKKNLIGALLFDSGETAEATRLKRTARRRYTRRKNRIC | |
| | YLQEIFSNEMAKVDDSFFHRLEESFLVEEDKKHERHPIFGNIVDEVAYHEKYPTIYHLRKKLVDSTDK | |
| | ADLRLIYLALAHMIKFRGHFLIEGDLNPDNSDVDKLFIQLVQTYNQLFEENPINASGVDAKAILSARL | |
| | SKSRRLENLIAQLPGEKKNGLFGNLIALSLGLTPNFKSNFDLAEDAKLQLSKDTYDDDLDNLLAQIGD | |
| | QYADLFLAAKNLSDAILLSDILRVNTEITKAPLSASMIKRYDEHHQDLTLLKALVRQQLPEKYKEIFF | |
| | DQSKNGYAGYIDGGASQEEFYKFIKPILEKMDGTEELLVKLNREDLLRKQRTFDNGSIPHQIHLGELH | |
| | AILRRQEDFYPFLKDNREKIEKILTFRIPYYVGPLARGNSRFAWMTRKSEETITPWNFEEVVDKGASA | |
| | QSFIERMTNFDKNLPNEKVLPKHSLLYEYFTVYNELTKVKYVTEGMRKPAFLSGEQKKAIVDLLFKTN | |
| | RKVTVKQLKEDYFKKIECFDSVEISGVEDRFNASLGTYHDLLKIIKDKDFLDNEENEDILEDIVLTLT | |
| | LFEDREMIEERLKTYAHLFDDKVMKQLKRRRYTGWGRLSRKLINGIRDKQSGKTILDFLKSDGFANRN | |
| | FMQLIHDDSLTFKEDIQKAQVSGQGDSLHEHIANLAGSPAIKKGILQTVKVVDELVKVMGRHKPENIV | |
| | IEMARENQTTQKGQKNSRERMKRIEEGIKELGSQILKEHPVENTQLQNEKLYLYYLQNGRDMYVDQEL | |
| | DINRLSDYDVDHIVPQSFLKDDSIDNKVLTRSDKNRGKSDNVPSEEVVKKMKNYWRQLLNAKLITQRK | |
| | FDNLTKAERGGLSELDKAGFIKRQLVETRQITKHVAQILDSRMNTKYDENDKLIREVKVITLKSKLVS | |
| | DFRKDFQFYKVREINNYHHAHDAYLNAVVGTALIKKYPKLESEFVYGDYKVYDVRKMIAKSEQEIGKA | |
| | TAKYFFYSNIMNFFKTEITLANGEIRKRPLIETNGETGEIVWDKGRDFATVRKVLSMPQVNIVKKTEV | |
| | QTGGFSKESILPKRNSDKLIARKKDWDPKKYGGFDSPTVAYSVLVVAKVEKGKSKKLKSVKELLGITI | |
| | MERSSFEKNPIDFLEAKGYKEVKKDLIIKLPKYSLFELENGRKRMLASAGELQKGNELALPSKYVNFL | |
| | YLASHYEKLKGSPEDNEQKQLFVEQHKHYLDEIIEQISEFSKRVILADANLDKVLSAYNKHRDKPIRE | |
| | QAENIIHLFTLTNLGAPAAFKYFDTTIDRKRYTSTKEVLDATLIHQSITGLYETRIDLSQLGGDSGGS | |
| | PKKKRKV | |
| ABE7.2 | MSEVEFSHEYWMRHALTLAKRAWDEREVPVGAVLVHNNRVIGEGWNRPIGRHDPTAHAEIMALRQGGL | 188 |
| | VMQNYRLIDATLYVTLEPCVMCAGAMIHSRIGRVVFGARDAKTGAAGSLMDVLHHPGMNHRVEITEGI | |
| | LADECAALLSDFFRMRRQEIKAQKKAQSSTDSGGSSGGSSGSETPGTSESATPESSGGSSGGSSEVEF | |
| | SHEYWMRHALTLAKRAWDEREVPVGAVLVLNNRVIGEGWNRAIGLHDPTAHAEIMALRQGGLVMQNYR | |
| | LIDATLYVTFEPCVMCAGAMIHSRIGRVVFGVRNAKTGAAGSLMDVLHYPGMNHRVEITEGILADECN | |
| | ALLCYFFRMRRQVFNAQKKAQSSTDSGGSSGGSSGSETPGTSESATPESSGGSSGGSDKKYSIGLAIG | |
| | TNSVGWAVITDEYKVPSKKFKVLGNTDRHSIKKNLIGALLFDSGETAEATRLKRTARRRYTRRKNRIC | |
| | YLQEIFSNEMAKVDDSFFHRLEESFLVEEDKKHERHPIFGNIVDEVAYHEKYPTIYHLRKKLVDSTDK | |
| | ADLRLIYLALAHMIKFRGHFLIEGDLNPDNSDVDKLFIQLVQTYNQLFEENPINASGVDAKAILSARL | |
| | SKSRRLENLIAQLPGEKKNGLFGNLIALSLGLTPNFKSNFDLAEDAKLQLSKDTYDDDLDNLLAQIGD | |
| | QYADLFLAAKNLSDAILLSDILRVNTEITKAPLSASMIKRYDEHHQDLTLLKALVRQQLPEKYKEIFF | |
| | DQSKNGYAGYIDGGASQEEFYKFIKPILEKMDGTEELLVKLNREDLLRKQRTFDNGSIPHQIHLGELH | |
| | AILRRQEDFYPFLKDNREKIEKILTFRIPYYVGPLARGNSRFAWMTRKSEETITPWNFEEVVDKGASA | |
| | QSFIERMTNFDKNLPNEKVLPKHSLLYEYFTVYNELTKVKYVTEGMRKPAFLSGEQKKAIVDLLFKTN | |
| | RKVTVKQLKEDYFKKIECFDSVEISGVEDRFNASLGTYHDLLKIIKDKDFLDNEENEDILEDIVLTLT | |
| | LFEDREMIEERLKTYAHLFDDKVMKQLKRRRYTGWGRLSRKLINGIRDKQSGKTILDFLKSDGFANRN | |
| | FMQLIHDDSLTFKEDIQKAQVSGQGDSLHEHIANLAGSPAIKKGILQTVKVVDELVKVMGRHKPENIV | |
| | IEMARENQTTQKGQKNSRERMKRIEEGIKELGSQILKEHPVENTQLQNEKLYLYYLQNGRDMYVDQEL | |
| | DINRLSDYDVDHIVPQSFLKDDSIDNKVLTRSDKNRGKSDNVPSEEVVKKMKNYWRQLLNAKLITQRK | |
| | FDNLTKAERGGLSELDKAGFIKRQLVETRQITKHVAQILDSRMNTKYDENDKLIREVKVITLKSKLVS | |
| | DFRKDFQFYKVREINNYHHAHDAYLNAVVGTALIKKYPKLESEFVYGDYKVYDVRKMIAKSEQEIGKA | |
| | TAKYFFYSNIMNFFKTEITLANGEIRKRPLIETNGETGEIVWDKGRDFATVRKVLSMPQVNIVKKTEV | |
| | QTGGFSKESILPKRNSDKLIARKKDWDPKKYGGFDSPTVAYSVLVVAKVEKGKSKKLKSVKELLGITI | |
| | MERSSFEKNPIDFLEAKGYKEVKKDLIIKLPKYSLFELENGRKRMLASAGELQKGNELALPSKYVNFL | |
| | YLASHYEKLKGSPEDNEQKQLFVEQHKHYLDEIIEQISEFSKRVILADANLDKVLSAYNKHRDKPIRE | |
| | QAENIIHLFTLTNLGAPAAFKYFDTTIDRKRYTSTKEVLDATLIHQSITGLYETRIDLSQLGGDSGGS | |
| | PKKKRKV | |
| pNMG-620 | MSEVEFSHEYWMRHALTLAKRAWDEREVPVGAVLVHNNRVIGEGWNRPIGRHDPTAHAEIMALRQGGL | 189 |
| | VMQNYRLIDATLYVTLEPCVMCAGAMIHSRIGRVVFGARDAKTGAAGSLMDVLHHPGMNHRVEITEGI | |
| | LADECAALLSDFFRMRRQEIKAQKKAQSSTDSGGSSGGSSGSETPGTSESATPESSGGSSGGSSEVEF | |
| | SHEYWMRHALTLAKRARDEREVPVGAVLVLNNRVIGEGWNRAIGLHDPTAHAEIMALRQGGLVMQNYR | |
| | LIDATLYVTFEPCVMCAGAMIHSRIGRVVFGVRNAKTGAAGSLMDVLHYPGMNHRVEITEGILADECA | |
| | ALLCYFFRMPRQVFNAQKKAQSSTDSGGSSGGSSGSETPGTSESATPESSGGSSGGSDKKYSIGLAIG | |
| | TNSVGWAVITDEYKVPSKKFKVLGNTDRHSIKKNLIGALLFDSGETAEATRLKRTARRRYTRRKNRIC | |
| | YLQEIFSNEMAKVDDSFFHRLEESFLVEEDKKHERHPIFGNIVDEVAYHEKYPTIYHLRKKLVDSTDK | |
| | ADLRLIYLALAHMIKFRGHFLIEGDLNPDNSDVDKLFIQLVQTYNQLFEENPINASGVDAKAILSARL | |
| | SKSRRLENLIAQLPGEKKNGLFGNLIALSLGLTPNFKSNFDLAEDAKLQLSKDTYDDDLDNLLAQIGD | |
| | QYADLFLAAKNLSDAILLSDILRVNTEITKAPLSASMIKRYDEHHQDLTLLKALVRQQLPEKYKEIFF | |
| | DQSKNGYAGYIDGGASQEEFYKFIKPILEKMDGTEELLVKLNREDLLRKQRTFDNGSIPHQIHLGELH | |
| | AILRRQEDFYPFLKDNREKIEKILTFRIPYYVGPLARGNSRFAWMTRKSEETITPWNFEEVVDKGASA | |
| | QSFIERMTNFDKNLPNEKVLPKHSLLYEYFTVYNELTKVKYVTEGMRKPAFLSGEQKKAIVDLLFKTN | |
| | RKVTVKQLKEDYFKKIECFDSVEISGVEDRFNASLGTYHDLLKIIKDKDFLDNEENEDILEDIVLTLT | |
| | LFEDREMIEERLKTYAHLFDDKVMKQLKRRRYTGWGRLSRKLINGIRDKQSGKTILDFLKSDGFANRN | |
| | FMQLIHDDSLTFKEDIQKAQVSGQGDSLHEHIANLAGSPAIKKGILQTVKVVDELVKVMGRHKPENIV | |
| | IEMARENQTTQKGQKNSRERMKRIEEGIKELGSQILKEHPVENTQLQNEKLYLYYLQNGRDMYVDQEL | |
| | DINRLSDYDVDHIVPQSFLKDDSIDNKVLTRSDKNRGKSDNVPSEEVVKKMKNYWRQLLNAKLITQRK | |
| | FDNLTKAERGGLSELDKAGFIKRQLVETRQITKHVAQILDSRMNTKYDENDKLIREVKVITLKSKLVS | |
| | DFRKDFQFYKVREINNYHHAHDAYLNAVVGTALIKKYPKLESEFVYGDYKVYDVRKMIAKSEQEIGKA | |
| | TAKYFFYSNIMNFFKTEITLANGEIRKRPLIETNGETGEIVWDKGRDFATVRKVLSMPQVNIVKKTEV | |
| | QTGGFSKESILPKRNSDKLIARKKDWDPKKYGGFDSPTVAYSVLVVAKVEKGKSKKLKSVKELLGITI | |
| | MERSSFEKNPIDFLEAKGYKEVKKDLIIKLPKYSLFELENGRKRMLASAGELQKGNELALPSKYVNFL | |
| | YLASHYEKLKGSPEDNEQKQLFVEQHKHYLDEIIEQISEFSKRVILADANLDKVLSAYNKHRDKPIRE | |
| | QAENIIHLFTLTNLGAPAAFKYFDTTIDRKRYTSTKEVLDATLIHQSITGLYETRIDLSQLGGDSGGS | |
| | PKKKRKV | |
| pNMG-617 | MSEVEFSHEYWMRHALTLAKRAWDEREVPVGAVLVHNNRVIGEGWNRPIGRHDPTAHAEIMALRQGGL | 190 |
| | VMQNYRLIDATLYVTLEPCVMCAGAMIHSRIGRVVFGARDAKTGAAGSLMDVLHHPGMNHRVEITEGI | |
| | LADECAALLSDFFRMRRQEIKAQKKAQSSTDSGGSSGGSSGSETPGTSESATPESSGGSSGGSSEVEF | |
| | SHEYWMRHALTLAKRALDEREVPVGAVLVLNNRVIGEGWNRAIGLHDPTAHAEIMALRQGGLVMQNYR | |
| | LIDATLYVTFEPCVMCAGAMIHSRIGRVVFGVRNAKTGAAGSLMDVLHYPGMNHRVEITEGILADECN | |
| | ALLCYFFRMRRQVFNAQKKAQSSTDSGGSSGGSSGSETPGTSESATPESSGGSSGGSDKKYSIGLAIG | |
| | TNSVGWAVITDEYKVPSKKFKVLGNTDRHSIKKNLIGALLFDSGETAEATRLKRTARRRYTRRKNRIC | |
| | YLQEIFSNEMAKVDDSFFHRLEESFLVEEDKKHERHPIFGNIVDEVAYHEKYPTIYHLRKKLVDSTDK | |
| | ADLRLIYLALAHMIKFRGHFLIEGDLNPDNSDVDKLFIQLVQTYNQLFEENPINASGVDAKAILSARL | |
| | SKSRRLENLIAQLPGEKKNGLFGNLIALSLGLTPNFKSNFDLAEDAKLQLSKDTYDDDLDNLLAQIGD | |
| | QYADLFLAAKNLSDAILLSDILRVNTEITKAPLSASMIKRYDEHHQDLTLLKALVRQQLPEKYKEIFF | |
| | DQSKNGYAGYIDGGASQEEFYKFIKPILEKMDGTEELLVKLNREDLLRKQRTFDNGSIPHQIHLGELH | |
| | AILRRQEDFYPFLKDNREKIEKILTFRIPYYVGPLARGNSRFAWMTRKSEETITPWNFEEVVDKGASA | |
| | QSFIERMTNFDKNLPNEKVLPKHSLLYEYFTVYNELTKVKYVTEGMRKPAFLSGEQKKAIVDLLFKTN | |
| | RKVTVKQLKEDYFKKIECFDSVEISGVEDRFNASLGTYHDLLKIIKDKDFLDNEENEDILEDIVLTLT | |
| | LFEDREMIEERLKTYAHLFDDKVMKQLKRRRYTGWGRLSRKLINGIRDKQSGKTILDFLKSDGFANRN | |
| | FMQLIHDDSLTFKEDIQKAQVSGQGDSLHEHIANLAGSPAIKKGILQTVKVVDELVKVMGRHKPENIV | |
| | IEMARENQTTQKGQKNSRERMKRIEEGIKELGSQILKEHPVENTQLQNEKLYLYYLQNGRDMYVDQEL | |
| | DINRLSDYDVDHIVPQSFLKDDSIDNKVLTRSDKNRGKSDNVPSEEVVKKMKNYWRQLLNAKLITQRK | |
| | FDNLTKAERGGLSELDKAGFIKRQLVETRQITKHVAQILDSRMNTKYDENDKLIREVKVITLKSKLVS | |
| | DFRKDFQFYKVREINNYHHAHDAYLNAVVGTALIKKYPKLESEFVYGDYKVYDVRKMIAKSEQEIGKA | |
| | TAKYFFYSNIMNFFKTEITLANGEIRKRPLIETNGETGEIVWDKGRDFATVRKVLSMPQVNIVKKTEV | |
| | QTGGFSKESILPKRNSDKLIARKKDWDPKKYGGFDSPTVAYSVLVVAKVEKGKSKKLKSVKELLGITI | |
| | MERSSFEKNPIDFLEAKGYKEVKKDLIIKLPKYSLFELENGRKRMLASAGELQKGNELALPSKYVNFL | |
| | YLASHYEKLKGSPEDNEQKQLFVEQHKHYLDEIIEQISEFSKRVILADANLDKVLSAYNKHRDKPIRE | |
| | QAENIIHLFTLTNLGAPAAFKYFDTTIDRKRYTSTKEVLDATLIHQSITGLYETRIDLSQLGGDSGGS | |
| | PKKKRKV | |
| pNMG-618 | MSEVEFSHEYWMRHALTLAKRAWDEREVPVGAVLVHNNRVIGEGWNRPIGRHDPTAHAEIMALRQGGL | 191 |
| | VMQNYRLIDATLYVTLEPCVMCAGAMIHSRIGRVVFGARDAKTGAAGSLMDVLHHPGMNHRVEITEGI | |
| | LADECAALLSDFFRMRRQEIKAQKKAQSSTDSGGSSGGSSGSETPGTSESATPESSGGSSGGSSEVEF | |
| | SHEYWMRHALTLAKRALDEREVPVGAVLVLNNRVIGEGWNRAIGLHDPTAHAEIMALRQGGLVMQNYR | |
| | LIDATLYVTFEPCVMCAGAMIHSRIGRVVFGVRNAKTGAAGSLMDVLHYPGMNHRVEITEGILADECN | |
| | ALLCYFFRMPRQVFNAQKKAQSSTDSGGSSGGSSGSETPGTSESATPESSGGSSGGSDKKYSIGLAIG | |
| | TNSVGWAVITDEYKVPSKKFKVLGNTDRHSIKKNLIGALLFDSGETAEATRLKRTARRRYTRRKNRIC | |
| | YLQEIFSNEMAKVDDSFFHRLEESFLVEEDKKHERHPIFGNIVDEVAYHEKYPTIYHLRKKLVDSTDK | |
| | ADLRLIYLALAHMIKFRGHFLIEGDLNPDNSDVDKLFIQLVQTYNQLFEENPINASGVDAKAILSARL | |
| | SKSRRLENLIAQLPGEKKNGLFGNLIALSLGLTPNFKSNFDLAEDAKLQLSKDTYDDDLDNLLAQIGD | |
| | QYADLFLAAKNLSDAILLSDILRVNTEITKAPLSASMIKRYDEHHQDLTLLKALVRQQLPEKYKEIFF | |
| | DQSKNGYAGYIDGGASQEEFYKFIKPILEKMDGTEELLVKLNREDLLRKQRTFDNGSIPHQIHLGELH | |
| | AILRRQEDFYPFLKDNREKIEKILTFRIPYYVGPLARGNSRFAWMTRKSEETITPWNFEEVVDKGASA | |
| | QSFIERMTNFDKNLPNEKVLPKHSLLYEYFTVYNELTKVKYVTEGMRKPAFLSGEQKKAIVDLLFKTN | |
| | RKVTVKQLKEDYFKKIECFDSVEISGVEDRFNASLGTYHDLLKIIKDKDFLDNEENEDILEDIVLTLT | |
| | LFEDREMIEERLKTYAHLFDDKVMKQLKRRRYTGWGRLSRKLINGIRDKQSGKTILDFLKSDGFANRN | |
| | FMQLIHDDSLTFKEDIQKAQVSGQGDSLHEHIANLAGSPAIKKGILQTVKVVDELVKVMGRHKPENIV | |
| | IEMARENQTTQKGQKNSRERMKRIEEGIKELGSQILKEHPVENTQLQNEKLYLYYLQNGRDMYVDQEL | |
| | DINRLSDYDVDHIVPQSFLKDDSIDNKVLTRSDKNRGKSDNVPSEEVVKKMKNYWRQLLNAKLITQRK | |
| | FDNLTKAERGGLSELDKAGFIKRQLVETRQITKHVAQILDSRMNTKYDENDKLIREVKVITLKSKLVS | |
| | DFRKDFQFYKVREINNYHHAHDAYLNAVVGTALIKKYPKLESEFVYGDYKVYDVRKMIAKSEQEIGKA | |
| | TAKYFFYSNIMNFFKTEITLANGEIRKRPLIETNGETGEIVWDKGRDFATVRKVLSMPQVNIVKKTEV | |
| | QTGGFSKESILPKRNSDKLIARKKDWDPKKYGGFDSPTVAYSVLVVAKVEKGKSKKLKSVKELLGITI | |
| | MERSSFEKNPIDFLEAKGYKEVKKDLIIKLPKYSLFELENGRKRMLASAGELQKGNELALPSKYVNFL | |
| | YLASHYEKLKGSPEDNEQKQLFVEQHKHYLDEIIEQISEFSKRVILADANLDKVLSAYNKHRDKPIRE | |
| | QAENIIHLFTLTNLGAPAAFKYFDTTIDRKRYTSTKEVLDATLIHQSITGLYETRIDLSQLGGDSGGS | |
| | PKKKRKV | |
| pNMG-620 | MSEVEFSHEYWMRHALTLAKRAWDEREVPVGAVLVHNNRVIGEGWNRPIGRHDPTAHAEIMALRQGGL | 192 |
| | VMQNYRLIDATLYVTLEPCVMCAGAMIHSRIGRVVFGARDAKTGAAGSLMDVLHHPGMNHRVEITEGI | |
| | LADECAALLSDFFRMRRQEIKAQKKAQSSTDSGGSSGGSSGSETPGTSESATPESSGGSSGGSSEVEF | |
| | SHEYWMRHALTLAKRARDEREVPVGAVLVLNNRVIGEGWNRAIGLHDPTAHAEIMALRQGGLVMQNYR | |
| | LIDATLYVTFEPCVMCAGAMIHSRIGRVVFGVRNAKTGAAGSLMDVLHYPGMNHRVEITEGILADECA | |
| | ALLCYFFRMPRQVFNAQKKAQSSTDSGGSSGGSSGSETPGTSESATPESSGGSSGGSDKKYSIGLAIG | |
| | TNSVGWAVITDEYKVPSKKFKVLGNTDRHSIKKNLIGALLFDSGETAEATRLKRTARRRYTRRKNRIC | |
| | YLQEIFSNEMAKVDDSFFHRLEESFLVEEDKKHERHPIFGNIVDEVAYHEKYPTIYHLRKKLVDSTDK | |
| | ADLRLIYLALAHMIKFRGHFLIEGDLNPDNSDVDKLFIQLVQTYNQLFEENPINASGVDAKAILSARL | |
| | SKSRRLENLIAQLPGEKKNGLFGNLIALSLGLTPNFKSNFDLAEDAKLQLSKDTYDDDLDNLLAQIGD | |
| | QYADLFLAAKNLSDAILLSDILRVNTEITKAPLSASMIKRYDEHHQDLTLLKALVRQQLPEKYKEIFF | |
| | DQSKNGYAGYIDGGASQEEFYKFIKPILEKMDGTEELLVKLNREDLLRKQRTFDNGSIPHQIHLGELH | |
| | AILRRQEDFYPFLKDNREKIEKILTFRIPYYVGPLARGNSRFAWMTRKSEETITPWNFEEVVDKGASA | |
| | QSFIERMTNFDKNLPNEKVLPKHSLLYEYFTVYNELTKVKYVTEGMRKPAFLSGEQKKAIVDLLFKTN | |
| | RKVTVKQLKEDYFKKIECFDSVEISGVEDRFNASLGTYHDLLKIIKDKDFLDNEENEDILEDIVLTLT | |
| | LFEDREMIEERLKTYAHLFDDKVMKQLKRRRYTGWGRLSRKLINGIRDKQSGKTILDFLKSDGFANRN | |
| | FMQLIHDDSLTFKEDIQKAQVSGQGDSLHEHIANLAGSPAIKKGILQTVKVVDELVKVMGRHKPENIV | |
| | IEMARENQTTQKGQKNSRERMKRIEEGIKELGSQILKEHPVENTQLQNEKLYLYYLQNGRDMYVDQEL | |
| | DINRLSDYDVDHIVPQSFLKDDSIDNKVLTRSDKNRGKSDNVPSEEVVKKMKNYWRQLLNAKLITQRK | |
| | FDNLTKAERGGLSELDKAGFIKRQLVETRQITKHVAQILDSRMNTKYDENDKLIREVKVITLKSKLVS | |
| | DFRKDFQFYKVREINNYHHAHDAYLNAVVGTALIKKYPKLESEFVYGDYKVYDVRKMIAKSEQEIGKA | |
| | TAKYFFYSNIMNFFKTEITLANGEIRKRPLIETNGETGEIVWDKGRDFATVRKVLSMPQVNIVKKTEV | |
| | QTGGFSKESILPKRNSDKLIARKKDWDPKKYGGFDSPTVAYSVLVVAKVEKGKSKKLKSVKELLGITI | |
| | MERSSFEKNPIDFLEAKGYKEVKKDLIIKLPKYSLFELENGRKRMLASAGELQKGNELALPSKYVNFL | |
| | YLASHYEKLKGSPEDNEQKQLFVEQHKHYLDEIIEQISEFSKRVILADANLDKVLSAYNKHRDKPIRE | |
| | QAENIIHLFTLTNLGAPAAFKYFDTTIDRKRYTSTKEVLDATLIHQSITGLYETRIDLSQLGGDSGGS | |
| | PKKKRKV | |
| pNMG-621 | MSEVEFSHEYWMRHALTLAKRAWDEREVPVGAVLVHNNRVIGEGWNRPIGRHDPTAHAEIMALRQGGL | 193 |
| | VMQNYRLIDATLYVTLEPCVMCAGAMIHSRIGRVVFGARDAKTGAAGSLMDVLHHPGMNHRVEITEGI | |
| | LADECAALLSDFFRMRRQEIKAQKKAQSSTDSGGSSGGSSGSETPGTSESATPESSGGSSGGSSEVEF | |
| | SHEYWMRHALTLAKRAWDEREVPVGAVLVLNNRVIGEGWNRAIGLHDPTAHAEIMALRQGGLVMQNYR | |
| | LIDATLYVTFEPCVMCAGAMIHSRIGRVVFGVRNAKTGAAGSLMDVLHYPGMNHRVEITEGILADECA | |
| | ALLCYFFRMPRQVFNAQKKAQSSTDSGGSSGGSSGSETPGTSESATPESDKKYSIGLAIGTNSVGWAV | |
| | ITDEYKVPSKKFKVLGNTDRHSIKKNLIGALLFDSGETAEATRLKRTARRRYTRRKNRICYLQEIFSN | |
| | EMAKVDDSFFHRLEESFLVEEDKKHERHPIFGNIVDEVAYHEKYPTIYHLRKKLVDSTDKADLRLIYL | |
| | ALAHMIKFRGHFLIEGDLNPDNSDVDKLFIQLVQTYNQLFEENPINASGVDAKAILSARLSKSRRLEN | |
| | LIAQLPGEKKNGLFGNLIALSLGLTPNFKSNFDLAEDAKLQLSKDTYDDDLDNLLAQIGDQYADLFLA | |
| | AKNLSDAILLSDILRVNTEITKAPLSASMIKRYDEHHQDLTLLKALVRQQLPEKYKEIFFDQSKNGYA | |
| | GYIDGGASQEEFYKFIKPILEKMDGTEELLVKLNREDLLRKQRTFDNGSIPHQIHLGELHAILRRQED | |
| | FYPFLKDNREKIEKILTFRIPYYVGPLARGNSRFAWMTRKSEETITPWNFEEVVDKGASAQSFIERMT | |
| | NFDKNLPNEKVLPKHSLLYEYFTVYNELTKVKYVTEGMRKPAFLSGEQKKAIVDLLFKTNRKVTVKQL | |
| | KEDYFKKIECFDSVEISGVEDRFNASLGTYHDLLKIIKDKDFLDNEENEDILEDIVLTLTLFEDREMI | |
| | EERLKTYAHLFDDKVMKQLKRRRYTGWGRLSRKLINGIRDKQSGKTILDFLKSDGFANRNFMQLIHDD | |
| | SLTFKEDIQKAQVSGQGDSLHEHIANLAGSPAIKKGILQTVKVVDELVKVMGRHKPENIVIEMARENQ | |
| | TTQKGQKNSRERMKRIEEGIKELGSQILKEHPVENTQLQNEKLYLYYLQNGRDMYVDQELDINRLSDY | |
| | DVDHIVPQSFLKDDSIDNKVLTRSDKNRGKSDNVPSEEVVKKMKNYWRQLLNAKLITQRKFDNLTKAE | |
| | RGGLSELDKAGFIKRQLVETRQITKHVAQILDSRMNTKYDENDKLIREVKVITLKSKLVSDFRKDFQF | |
| | YKVREINNYHHAHDAYLNAVVGTALIKKYPKLESEFVYGDYKVYDVRKMIAKSEQEIGKATAKYFFYS | |
| | NIMNFFKTEITLANGEIRKRPLIETNGETGEIVWDKGRDFATVRKVLSMPQVNIVKKTEVQTGGFSKE | |
| | SILPKRNSDKLIARKKDWDPKKYGGFDSPTVAYSVLVVAKVEKGKSKKLKSVKELLGITIMERSSFEK | |
| | NPIDFLEAKGYKEVKKDLIIKLPKYSLFELENGRKRMLASAGELQKGNELALPSKYVNFLYLASHYEK | |
| | LKGSPEDNEQKQLFVEQHKHYLDEIIEQISEFSKRVILADANLDKVLSAYNKHRDKPIREQAENIIHL | |
| | FTLTNLGAPAAFKYFDTTIDRKRYTSTKEVLDATLIHQSITGLYETRIDLSQLGGDSGGSPKKKRKV | |
| pNMG-622 | MSEVEFSHEYWMRHALTLAKRAWDEREVPVGAVLVHNNRVIGEGWNRPIGRHDPTAHAEIMALRQGGL | 194 |
| | VMQNYRLIDATLYVTLEPCVMCAGAMIHSRIGRVVFGARDAKTGAAGSLMDVLHHPGMNHRVEITEGI | |
| | LADECAALLSDFFRMRRQEIKAQKKAQSSTDSGGSSGGSSGSETPGTSESATPESSGGSSGGSSEVEF | |
| | SHEYWMRHALTLAKRAWDEREVPVGAVLVLNNRVIGEGWNRAIGLHDPTAHAEIMALRQGGLVMQNYR | |
| | LIDATLYVTFEPCVMCAGAMIHSRIGRVVFGVRNAKTGAAGSLMDVLHYPGMNHRVEITEGILADECN | |
| | ALLCYFFRMPRQVFNAQKKAQSSTDSGGSSGGSSGSETPGTSESATPESDKKYSIGLAIGTNSVGWAV | |
| | ITDEYKVPSKKFKVLGNTDRHSIKKNLIGALLFDSGETAEATRLKRTARRRYTRRKNRICYLQEIFSN | |
| | EMAKVDDSFFHRLEESFLVEEDKKHERHPIFGNIVDEVAYHEKYPTIYHLRKKLVDSTDKADLRLIYL | |
| | ALAHMIKFRGHFLIEGDLNPDNSDVDKLFIQLVQTYNQLFEENPINASGVDAKAILSARLSKSRRLEN | |
| | LIAQLPGEKKNGLFGNLIALSLGLTPNFKSNFDLAEDAKLQLSKDTYDDDLDNLLAQIGDQYADLFLA | |
| | AKNLSDAILLSDILRVNTEITKAPLSASMIKRYDEHHQDLTLLKALVRQQLPEKYKEIFFDQSKNGYA | |
| | GYIDGGASQEEFYKFIKPILEKMDGTEELLVKLNREDLLRKQRTFDNGSIPHQIHLGELHAILRRQED | |
| | FYPFLKDNREKIEKILTFRIPYYVGPLARGNSRFAWMTRKSEETITPWNFEEVVDKGASAQSFIERMT | |
| | NFDKNLPNEKVLPKHSLLYEYFTVYNELTKVKYVTEGMRKPAFLSGEQKKAIVDLLFKTNRKVTVKQL | |
| | KEDYFKKIECFDSVEISGVEDRFNASLGTYHDLLKIIKDKDFLDNEENEDILEDIVLTLTLFEDREMI | |
| | EERLKTYAHLFDDKVMKQLKRRRYTGWGRLSRKLINGIRDKQSGKTILDFLKSDGFANRNFMQLIHDD | |
| | SLTFKEDIQKAQVSGQGDSLHEHIANLAGSPAIKKGILQTVKVVDELVKVMGRHKPENIVIEMARENQ | |
| | TTQKGQKNSRERMKRIEEGIKELGSQILKEHPVENTQLQNEKLYLYYLQNGRDMYVDQELDINRLSDY | |
| | DVDHIVPQSFLKDDSIDNKVLTRSDKNRGKSDNVPSEEVVKKMKNYWRQLLNAKLITQRKFDNLTKAE | |
| | RGGLSELDKAGFIKRQLVETRQITKHVAQILDSRMNTKYDENDKLIREVKVITLKSKLVSDFRKDFQF | |
| | YKVREINNYHHAHDAYLNAVVGTALIKKYPKLESEFVYGDYKVYDVRKMIAKSEQEIGKATAKYFFYS | |
| | NIMNFFKTEITLANGEIRKRPLIETNGETGEIVWDKGRDFATVRKVLSMPQVNIVKKTEVQTGGFSKE | |
| | SILPKRNSDKLIARKKDWDPKKYGGFDSPTVAYSVLVVAKVEKGKSKKLKSVKELLGITIMERSSFEK | |
| | NPIDFLEAKGYKEVKKDLIIKLPKYSLFELENGRKRMLASAGELQKGNELALPSKYVNFLYLASHYEK | |
| | LKGSPEDNEQKQLFVEQHKHYLDEIIEQISEFSKRVILADANLDKVLSAYNKHRDKPIREQAENIIHL | |
| | FTLTNLGAPAAFKYFDTTIDRKRYTSTKEVLDATLIHQSITGLYETRIDLSQLGGDSGGSPKKKRKV | |
| pNMG-623 | MSEVEFSHEYWMRHALTLAKRAWDEREVPVGAVLVHNNRVIGEGWNRPIGRHDPTAHAEIMALRQGGL | 195 |
| | VMQNYRLIDATLYVTLEPCVMCAGAMIHSRIGRVVFGARDAKTGAAGSLMDVLHHPGMNHRVEITEGI | |
| | LADECAALLSDFFRMRRQEIKAQKKAQSSTDSGGSSGGSSGSETPGTSESATPESSGGSSGGSSEVEF | |
| | SHEYWMRHALTLAKRALDEREVPVGAVLVLNNRVIGEGWNRAIGLHDPTAHAEIMALRQGGLVMQNYR | |
| | LIDATLYVTFEPCVMCAGAMIHSRIGRVVFGVRNAKTGAAGSLMDVLHYPGMNHRVEITEGILADECA | |
| | ALLCYFFRMPRQVFNAQKKAQSSTDSGGSSGGSSGSETPGTSESATPESDKKYSIGLAIGTNSVGWAV | |
| | ITDEYKVPSKKFKVLGNTDRHSIKKNLIGALLFDSGETAEATRLKRTARRRYTRRKNRICYLQEIFSN | |
| | EMAKVDDSFFHRLEESFLVEEDKKHERHPIFGNIVDEVAYHEKYPTIYHLRKKLVDSTDKADLRLIYL | |
| | ALAHMIKFRGHFLIEGDLNPDNSDVDKLFIQLVQTYNQLFEENPINASGVDAKAILSARLSKSRRLEN | |
| | LIAQLPGEKKNGLFGNLIALSLGLTPNFKSNFDLAEDAKLQLSKDTYDDDLDNLLAQIGDQYADLFLA | |
| | AKNLSDAILLSDILRVNTEITKAPLSASMIKRYDEHHQDLTLLKALVRQQLPEKYKEIFFDQSKNGYA | |
| | GYIDGGASQEEFYKFIKPILEKMDGTEELLVKLNREDLLRKQRTFDNGSIPHQIHLGELHAILRRQED | |
| | FYPFLKDNREKIEKILTFRIPYYVGPLARGNSRFAWMTRKSEETITPWNFEEVVDKGASAQSFIERMT | |
| | NFDKNLPNEKVLPKHSLLYEYFTVYNELTKVKYVTEGMRKPAFLSGEQKKAIVDLLFKTNRKVTVKQL | |
| | KEDYFKKIECFDSVEISGVEDRFNASLGTYHDLLKIIKDKDFLDNEENEDILEDIVLTLTLFEDREMI | |
| | EERLKTYAHLFDDKVMKQLKRRRYTGWGRLSRKLINGIRDKQSGKTILDFLKSDGFANRNFMQLIHDD | |
| | SLTFKEDIQKAQVSGQGDSLHEHIANLAGSPAIKKGILQTVKVVDELVKVMGRHKPENIVIEMARENQ | |
| | TTQKGQKNSRERMKRIEEGIKELGSQILKEHPVENTQLQNEKLYLYYLQNGRDMYVDQELDINRLSDY | |
| | DVDHIVPQSFLKDDSIDNKVLTRSDKNRGKSDNVPSEEVVKKMKNYWRQLLNAKLITQRKFDNLTKAE | |
| | RGGLSELDKAGFIKRQLVETRQITKHVAQILDSRMNTKYDENDKLIREVKVITLKSKLVSDFRKDFQF | |
| | YKVREINNYHHAHDAYLNAVVGTALIKKYPKLESEFVYGDYKVYDVRKMIAKSEQEIGKATAKYFFYS | |
| | NIMNFFKTEITLANGEIRKRPLIETNGETGEIVWDKGRDFATVRKVLSMPQVNIVKKTEVQTGGFSKE | |
| | SILPKRNSDKLIARKKDWDPKKYGGFDSPTVAYSVLVVAKVEKGKSKKLKSVKELLGITIMERSSFEK | |
| | NPIDFLEAKGYKEVKKDLIIKLPKYSLFELENGRKRMLASAGELQKGNELALPSKYVNFLYLASHYEK | |
| | LKGSPEDNEQKQLFVEQHKHYLDEIIEQISEFSKRVILADANLDKVLSAYNKHRDKPIREQAENIIHL | |
| | FTLTNLGAPAAFKYFDTTIDRKRYTSTKEVLDATLIHQSITGLYETRIDLSQLGGDSGGSPKKKRKV | |
| ABE6.3 | MSEVEFSHEYWMRHALTLAKRAWDEREVPVGAVLVHNNRVIGEGWNRPIGRHDPTAHAEIMALRQGGL | 196 |
| | VMQNYRLIDATLYVTLEPCVMCAGAMIHSRIGRVVFGARDAKTGAAGSLMDVLHHPGMNHRVEITEGI | |
| | LADECAALLSDFFRMRRQEIKAQKKAQSSTDSGGSSGGSSGSETPGTSESATPESSGGSSGGSSEVEF | |
| | SHEYWMRHALTLAKRAWDEREVPVGAVLVLNNRVIGEGWNRSIGLHDPTAHAEIMALRQGGLVMQNYR | |
| | LIDATLYVTFEPCVMCAGAMIHSRIGRVVFGVRNAKTGAAGSLMDVLHYPGMNHRVEITEGILADECA | |
| | ALLCYFFRMRRQVFNAQKKAQSSTDSGGSSGGSSGSETPGTSESATPESSGGSSGGSDKKYSIGLAIG | |
| | TNSVGWAVITDEYKVPSKKFKVLGNTDRHSIKKNLIGALLFDSGETAEATRLKRTARRRYTRRKNRIC | |
| | YLQEIFSNEMAKVDDSFFHRLEESFLVEEDKKHERHPIFGNIVDEVAYHEKYPTIYHLRKKLVDSTDK | |
| | ADLRLIYLALAHMIKFRGHFLIEGDLNPDNSDVDKLFIQLVQTYNQLFEENPINASGVDAKAILSARL | |
| | SKSRRLENLIAQLPGEKKNGLFGNLIALSLGLTPNFKSNFDLAEDAKLQLSKDTYDDDLDNLLAQIGD | |
| | QYADLFLAAKNLSDAILLSDILRVNTEITKAPLSASMIKRYDEHHQDLTLLKALVRQQLPEKYKEIFF | |
| | DQSKNGYAGYIDGGASQEEFYKFIKPILEKMDGTEELLVKLNREDLLRKQRTFDNGSIPHQIHLGELH | |
| | AILRRQEDFYPFLKDNREKIEKILTFRIPYYVGPLARGNSRFAWMTRKSEETITPWNFEEVVDKGASA | |
| | QSFIERMTNFDKNLPNEKVLPKHSLLYEYFTVYNELTKVKYVTEGMRKPAFLSGEQKKAIVDLLFKTN | |
| | RKVTVKQLKEDYFKKIECFDSVEISGVEDRFNASLGTYHDLLKIIKDKDFLDNEENEDILEDIVLTLT | |
| | LFEDREMIEERLKTYAHLFDDKVMKQLKRRRYTGWGRLSRKLINGIRDKQSGKTILDFLKSDGFANRN | |
| | FMQLIHDDSLTFKEDIQKAQVSGQGDSLHEHIANLAGSPAIKKGILQTVKVVDELVKVMGRHKPENIV | |
| | IEMARENQTTQKGQKNSRERMKRIEEGIKELGSQILKEHPVENTQLQNEKLYLYYLQNGRDMYVDQEL | |
| | DINRLSDYDVDHIVPQSFLKDDSIDNKVLTRSDKNRGKSDNVPSEEVVKKMKNYWRQLLNAKLITQRK | |
| | FDNLTKAERGGLSELDKAGFIKRQLVETRQITKHVAQILDSRMNTKYDENDKLIREVKVITLKSKLVS | |
| | DFRKDFQFYKVREINNYHHAHDAYLNAVVGTALIKKYPKLESEFVYGDYKVYDVRKMIAKSEQEIGKA | |
| | TAKYFFYSNIMNFFKTEITLANGEIRKRPLIETNGETGEIVWDKGRDFATVRKVLSMPQVNIVKKTEV | |
| | QTGGFSKESILPKRNSDKLIARKKDWDPKKYGGFDSPTVAYSVLVVAKVEKGKSKKLKSVKELLGITI | |
| | MERSSFEKNPIDFLEAKGYKEVKKDLIIKLPKYSLFELENGRKRMLASAGELQKGNELALPSKYVNFL | |
| | YLASHYEKLKGSPEDNEQKQLFVEQHKHYLDEIIEQISEFSKRVILADANLDKVLSAYNKHRDKPIRE | |
| | QAENIIHLFTLTNLGAPAAFKYFDTTIDRKRYTSTKEVLDATLIHQSITGLYETRIDLSQLGGDSGGS | |
| | PKKKRKV | |
| ABE6.4 | MSEVEFSHEYWMRHALTLAKRAWDEREVPVGAVLVHNNRVIGEGWNRPIGRHDPTAHAEIMALRQGGL | 197 |
| | VMQNYRLIDATLYVTLEPCVMCAGAMIHSRIGRVVFGARDAKTGAAGSLMDVLHHPGMNHRVEITEGI | |
| | LADECAALLSDFFRMRRQEIKAQKKAQSSTDSGGSSGGSSGSETPGTSESATPESSGGSSGGSSEVEF | |
| | SHEYWMRHALTLAKRAWDEREVPVGAVLVLNNRVIGEGWNRSIGLHDPTAHAEIMALRQGGLVMQNYR | |
| | LIDATLYVTFEPCVMCAGAMIHSRIGRVVFGVRNAKTGAAGSLMDVLHYPGMNHRVEITEGILADECN | |
| | ALLCYFFRMRRQVFNAQKKAQSSTDSGGSSGGSSGSETPGTSESATPESSGGSSGGSDKKYSIGLAIG | |
| | TNSVGWAVITDEYKVPSKKFKVLGNTDRHSIKKNLIGALLFDSGETAEATRLKRTARRRYTRRKNRIC | |
| | YLQEIFSNEMAKVDDSFFHRLEESFLVEEDKKHERHPIFGNIVDEVAYHEKYPTIYHLRKKLVDSTDK | |
| | ADLRLIYLALAHMIKFRGHFLIEGDLNPDNSDVDKLFIQLVQTYNQLFEENPINASGVDAKAILSARL | |
| | SKSRRLENLIAQLPGEKKNGLFGNLIALSLGLTPNFKSNFDLAEDAKLQLSKDTYDDDLDNLLAQIGD | |
| | QYADLFLAAKNLSDAILLSDILRVNTEITKAPLSASMIKRYDEHHQDLTLLKALVRQQLPEKYKEIFF | |
| | DQSKNGYAGYIDGGASQEEFYKFIKPILEKMDGTEELLVKLNREDLLRKQRTFDNGSIPHQIHLGELH | |
| | AILRRQEDFYPFLKDNREKIEKILTFRIPYYVGPLARGNSRFAWMTRKSEETITPWNFEEVVDKGASA | |
| | QSFIERMTNFDKNLPNEKVLPKHSLLYEYFTVYNELTKVKYVTEGMRKPAFLSGEQKKAIVDLLFKTN | |
| | RKVTVKQLKEDYFKKIECFDSVEISGVEDRFNASLGTYHDLLKIIKDKDFLDNEENEDILEDIVLTLT | |
| | LFEDREMIEERLKTYAHLFDDKVMKQLKRRRYTGWGRLSRKLINGIRDKQSGKTILDFLKSDGFANRN | |
| | FMQLIHDDSLTFKEDIQKAQVSGQGDSLHEHIANLAGSPAIKKGILQTVKVVDELVKVMGRHKPENIV | |
| | IEMARENQTTQKGQKNSRERMKRIEEGIKELGSQILKEHPVENTQLQNEKLYLYYLQNGRDMYVDQEL | |
| | DINRLSDYDVDHIVPQSFLKDDSIDNKVLTRSDKNRGKSDNVPSEEVVKKMKNYWRQLLNAKLITQRK | |
| | FDNLTKAERGGLSELDKAGFIKRQLVETRQITKHVAQILDSRMNTKYDENDKLIREVKVITLKSKLVS | |
| | DFRKDFQFYKVREINNYHHAHDAYLNAVVGTALIKKYPKLESEFVYGDYKVYDVRKMIAKSEQEIGKA | |
| | TAKYFFYSNIMNFFKTEITLANGEIRKRPLIETNGETGEIVWDKGRDFATVRKVLSMPQVNIVKKTEV | |
| | QTGGFSKESILPKRNSDKLIARKKDWDPKKYGGFDSPTVAYSVLVVAKVEKGKSKKLKSVKELLGITI | |
| | MERSSFEKNPIDFLEAKGYKEVKKDLIIKLPKYSLFELENGRKRMLASAGELQKGNELALPSKYVNFL | |
| | YLASHYEKLKGSPEDNEQKQLFVEQHKHYLDEIIEQISEFSKRVILADANLDKVLSAYNKHRDKPIRE | |
| | QAENIIHLFTLTNLGAPAAFKYFDTTIDRKRYTSTKEVLDATLIHQSITGLYETRIDLSQLGGDSGGS | |
| | PKKKRKV | |
| ABE7.8 | MSEVEFSHEYWMRHALTLAKRAWDEREVPVGAVLVHNNRVIGEGWNRPIGRHDPTAHAEIMALRQGGL | 198 |
| | VMQNYRLIDATLYVTLEPCVMCAGAMIHSRIGRVVFGARDAKTGAAGSLMDVLHHPGMNHRVEITEGI | |
| | LADECAALLSDFFRMRRQEIKAQKKAQSSTDSGGSSGGSSGSETPGTSESATPESSGGSSGGSSEVEF | |
| | SHEYWMRHALTLAKRALDEREVPVGAVLVLNNRVIGEGWNRAIGLHDPTAHAEIMALRQGGLVMQNYR | |
| | LIDATLYVTFEPCVMCAGAMIHSRIGRVVFGVRNAKTGAAGSLMDVLHYPGMNHRVEITEGILADECN | |
| | ALLCYFFRMRRQVFNAQKKAQSSTDSGGSSGGSSGSETPGTSESATPESSGGSSGGSDKKYSIGLAIG | |
| | TNSVGWAVITDEYKVPSKKFKVLGNTDRHSIKKNLIGALLFDSGETAEATRLKRTARRRYTRRKNRIC | |
| | YLQEIFSNEMAKVDDSFFHRLEESFLVEEDKKHERHPIFGNIVDEVAYHEKYPTIYHLRKKLVDSTDK | |
| | ADLRLIYLALAHMIKFRGHFLIEGDLNPDNSDVDKLFIQLVQTYNQLFEENPINASGVDAKAILSARL | |
| | SKSRRLENLIAQLPGEKKNGLFGNLIALSLGLTPNFKSNFDLAEDAKLQLSKDTYDDDLDNLLAQIGD | |
| | QYADLFLAAKNLSDAILLSDILRVNTEITKAPLSASMIKRYDEHHQDLTLLKALVRQQLPEKYKEIFF | |
| | DQSKNGYAGYIDGGASQEEFYKFIKPILEKMDGTEELLVKLNREDLLRKQRTFDNGSIPHQIHLGELH | |
| | AILRRQEDFYPFLKDNREKIEKILTFRIPYYVGPLARGNSRFAWMTRKSEETITPWNFEEVVDKGASA | |
| | QSFIERMTNFDKNLPNEKVLPKHSLLYEYFTVYNELTKVKYVTEGMRKPAFLSGEQKKAIVDLLFKTN | |
| | RKVTVKQLKEDYFKKIECFDSVEISGVEDRFNASLGTYHDLLKIIKDKDFLDNEENEDILEDIVLTLT | |
| | LFEDREMIEERLKTYAHLFDDKVMKQLKRRRYTGWGRLSRKLINGIRDKQSGKTILDFLKSDGFANRN | |
| | FMQLIHDDSLTFKEDIQKAQVSGQGDSLHEHIANLAGSPAIKKGILQTVKVVDELVKVMGRHKPENIV | |
| | IEMARENQTTQKGQKNSRERMKRIEEGIKELGSQILKEHPVENTQLQNEKLYLYYLQNGRDMYVDQEL | |
| | DINRLSDYDVDHIVPQSFLKDDSIDNKVLTRSDKNRGKSDNVPSEEVVKKMKNYWRQLLNAKLITQRK | |
| | FDNLTKAERGGLSELDKAGFIKRQLVETRQITKHVAQILDSRMNTKYDENDKLIREVKVITLKSKLVS | |
| | DFRKDFQFYKVREINNYHHAHDAYLNAVVGTALIKKYPKLESEFVYGDYKVYDVRKMIAKSEQEIGKA | |
| | TAKYFFYSNIMNFFKTEITLANGEIRKRPLIETNGETGEIVWDKGRDFATVRKVLSMPQVNIVKKTEV | |
| | QTGGFSKESILPKRNSDKLIARKKDWDPKKYGGFDSPTVAYSVLVVAKVEKGKSKKLKSVKELLGITI | |
| | MERSSFEKNPIDFLEAKGYKEVKKDLIIKLPKYSLFELENGRKRMLASAGELQKGNELALPSKYVNFL | |
| | YLASHYEKLKGSPEDNEQKQLFVEQHKHYLDEIIEQISEFSKRVILADANLDKVLSAYNKHRDKPIRE | |
| | QAENIIHLFTLTNLGAPAAFKYFDTTIDRKRYTSTKEVLDATLIHQSITGLYETRIDLSQLGGDSGGS | |
| | PKKKRKVc | |
| ABE7.9 | MSEVEFSHEYWMRHALTLAKRAWDEREVPVGAVLVHNNRVIGEGWNRPIGRHDPTAHAEIMALRQGGL | 199 |
| | VMQNYRLIDATLYVTLEPCVMCAGAMIHSRIGRVVFGARDAKTGAAGSLMDVLHHPGMNHRVEITEGI | |
| | LADECAALLSDFFRMRRQEIKAQKKAQSSTDSGGSSGGSSGSETPGTSESATPESSGGSSGGSSEVEF | |
| | SHEYWMRHALTLAKRALDEREVPVGAVLVLNNRGEGWNRAIGLHDPTAHAEIMALRQGGLVMQNYRLI | |
| | DATLYVTFEPCVMCAGAMIHSRIGRVVFGVRNAKTGAAGSLMDVLHYPGMNHRVEITEGILADECNAL | |
| | LCYFFRMPRQVFNAQKKAQSSTDSGGSSGGSSGSETPGTSESATPESSGGSSGGSDKKYSIGLAIGTN | |
| | SVGWAVITDEYKVPSKKFKVLGNTDRHSIKKNLIGALLFDSGETAEATRLKRTARRRYTRRKNRICYL | |
| | QEIFSNEMAKVDDSFFHRLEESFLVEEDKKHERHPIFGNIVDEVAYHEKYPTIYHLRKKLVDSTDKAD | |
| | LRLIYLALAHMIKFRGHFLIEGDLNPDNSDVDKLFIQLVQTYNQLFEENPINASGVDAKAILSARLSK | |
| | SRRLENLIAQLPGEKKNGLFGNLIALSLGLTPNFKSNFDLAEDAKLQLSKDTYDDDLDNLLAQIGDQY | |
| | ADLFLAAKNLSDAILLSDILRVNTEITKAPLSASMIKRYDEHHQDLTLLKALVRQQLPEKYKEIFFDQ | |
| | SKNGYAGYIDGGASQEEFYKFIKPILEKMDGTEELLVKLNREDLLRKQRTFDNGSIPHQIHLGELHAI | |
| | LRRQEDFYPFLKDNREKIEKILTFRIPYYVGPLARGNSRFAWMTRKSEETITPWNFEEVVDKGASAQS | |
| | FIERMTNFDKNLPNEKVLPKHSLLYEYFTVYNELTKVKYVTEGMRKPAFLSGEQKKAIVDLLFKTNRK | |
| | VTVKQLKEDYFKKIECFDSVEISGVEDRFNASLGTYHDLLKIIKDKDFLDNEENEDILEDIVLTLTLF | |
| | EDREMIEERLKTYAHLFDDKVMKQLKRRRYTGWGRLSRKLINGIRDKQSGKTILDFLKSDGFANRNFM | |
| | QLIHDDSLTFKEDIQKAQVSGQGDSLHEHIANLAGSPAIKKGILQTVKVVDELVKVMGRHKPENIVIE | |
| | MARENQTTQKGQKNSRERMKRIEEGIKELGSQILKEHPVENTQLQNEKLYLYYLQNGRDMYVDQELDI | |
| | NRLSDYDVDHIVPQSFLKDDSIDNKVLTRSDKNRGKSDNVPSEEVVKKMKNYWRQLLNAKLITQRKFD | |
| | NLTKAERGGLSELDKAGFIKRQLVETRQITKHVAQILDSRMNTKYDENDKLIREVKVITLKSKLVSDF | |
| | RKDFQFYKVREINNYHHAHDAYLNAVVGTALIKKYPKLESEFVYGDYKVYDVRKMIAKSEQEIGKATA | |
| | KYFFYSNIMNFFKTEITLANGEIRKRPLIETNGETGEIVWDKGRDFATVRKVLSMPQVNIVKKTEVQT | |
| | GGFSKESILPKRNSDKLIARKKDWDPKKYGGFDSPTVAYSVLVVAKVEKGKSKKLKSVKELLGITIME | |
| | RSSFEKNPIDFLEAKGYKEVKKDLIIKLPKYSLFELENGRKRMLASAGELQKGNELALPSKYVNFLYL | |
| | ASHYEKLKGSPEDNEQKQLFVEQHKHYLDEIIEQISEFSKRVILADANLDKVLSAYNKHRDKPIREQA | |
| | ENIIHLFTLTNLGAPAAFKYFDTTIDRKRYTSTKEVLDATLIHQSITGLYETRIDLSQLGGDSGGSPK | |
| | KKRKV | |
| ABE7.10 | MSEVEFSHEYWMRHALTLAKRAWDEREVPVGAVLVHNNRVIGEGWNRPIGRHDPTAHAEIMALRQGGL | 200 |
| | VMQNYRLIDATLYVTLEPCVMCAGAMIHSRIGRVVFGARDAKTGAAGSLMDVLHHPGMNHRVEITEGI | |
| | LADECAALLSDFFRMRRQEIKAQKKAQSSTDSGGSSGGSSGSETPGTSESATPESSGGSSGGSSEVEF | |
| | SHEYWMRHALTLAKRARDEREVPVGAVLVLNNRVIGEGWNRAIGLHDPTAHAEIMALRQGGLVMQNYR | |
| | LIDATLYVTFEPCVMCAGAMIHSRIGRVVFGVRNAKTGAAGSLMDVLHYPGMNHRVEITEGILADECA | |
| | ALLCYFFRMPRQVFNAQKKAQSSTDSGGSSGGSSGSETPGTSESATPESSGGSSGGSDKKYSIGLAIG | |
| | TNSVGWAVITDEYKVPSKKFKVLGNTDRHSIKKNLIGALLFDSGETAEATRLKRTARRRYTRRKNRIC | |
| | YLQEIFSNEMAKVDDSFFHRLEESFLVEEDKKHERHPIFGNIVDEVAYHEKYPTIYHLRKKLVDSTDK | |
| | ADLRLIYLALAHMIKFRGHFLIEGDLNPDNSDVDKLFIQLVQTYNQLFEENPINASGVDAKAILSARL | |
| | SKSRRLENLIAQLPGEKKNGLFGNLIALSLGLTPNFKSNFDLAEDAKLQLSKDTYDDDLDNLLAQIGD | |
| | QYADLFLAAKNLSDAILLSDILRVNTEITKAPLSASMIKRYDEHHQDLTLLKALVRQQLPEKYKEIFF | |
| | DQSKNGYAGYIDGGASQEEFYKFIKPILEKMDGTEELLVKLNREDLLRKQRTFDNGSIPHQIHLGELH | |
| | AILRRQEDFYPFLKDNREKIEKILTFRIPYYVGPLARGNSRFAWMTRKSEETITPWNFEEVVDKGASA | |
| | QSFIERMTNFDKNLPNEKVLPKHSLLYEYFTVYNELTKVKYVTEGMRKPAFLSGEQKKAIVDLLFKTN | |
| | RKVTVKQLKEDYFKKIECFDSVEISGVEDRFNASLGTYHDLLKIIKDKDFLDNEENEDILEDIVLTLT | |
| | LFEDREMIEERLKTYAHLFDDKVMKQLKRRRYTGWGRLSRKLINGIRDKQSGKTILDFLKSDGFANRN | |
| | FMQLIHDDSLTFKEDIQKAQVSGQGDSLHEHIANLAGSPAIKKGILQTVKVVDELVKVMGRHKPENIV | |
| | IEMARENQTTQKGQKNSRERMKRIEEGIKELGSQILKEHPVENTQLQNEKLYLYYLQNGRDMYVDQEL | |
| | DINRLSDYDVDHIVPQSFLKDDSIDNKVLTRSDKNRGKSDNVPSEEVVKKMKNYWRQLLNAKLITQRK | |
| | FDNLTKAERGGLSELDKAGFIKRQLVETRQITKHVAQILDSRMNTKYDENDKLIREVKVITLKSKLVS | |
| | DFRKDFQFYKVREINNYHHAHDAYLNAVVGTALIKKYPKLESEFVYGDYKVYDVRKMIAKSEQEIGKA | |
| | TAKYFFYSNIMNFFKTEITLANGEIRKRPLIETNGETGEIVWDKGRDFATVRKVLSMPQVNIVKKTEV | |
| | QTGGFSKESILPKRNSDKLIARKKDWDPKKYGGFDSPTVAYSVLVVAKVEKGKSKKLKSVKELLGITI | |
| | MERSSFEKNPIDFLEAKGYKEVKKDLIIKLPKYSLFELENGRKRMLASAGELQKGNELALPSKYVNFL | |
| | YLASHYEKLKGSPEDNEQKQLFVEQHKHYLDEIIEQISEFSKRVILADANLDKVLSAYNKHRDKPIRE | |
| | QAENIIHLFTLTNLGAPAAFKYFDTTIDRKRYTSTKEVLDATLIHQSITGLYETRIDLSQLGGDSGGS | |
| | PKKKRKV | |
| ABEmax (7.10) | MKRTADGSEFESPKKKRKVSEVEFSHEYWMRHALTLAKRAWDEREVPVGAVLVHNNRVIGEGWNRPIG | 201 |
| | RHDPTAHAEIMALRQGGLVMQNYRLIDATLYVTLEPCVMCAGAMIHSRIGRVVFGARDAKTGAAGSLM | |
| | DVLHHPGMNHRVEITEGILADECAALLSDFFRMRRQEIKAQKKAQSSTDSGGSSGGSSGSETPGTSES | |
| | ATPESSGGSSGGSSEVEFSHEYWMRHALTLAKRARDEREVPVGAVLVLNNRVIGEGWNRAIGLHDPTA | |
| | HAEIMALRQGGLVMQNYRLIDATLYVTFEPCVMCAGAMIHSRIGRVVFGVRNAKTGAAGSLMDVLHYP | |
| | GMNHRVEITEGILADECAALLCYFFRMPRQVFNAQKKAQSSTDSGGSSGGSSGSETPGTSESATPESS | |
| | GGSSGGSDKKYSIGLAIGTNSVGWAVITDEYKVPSKKFKVLGNTDRHSIKKNLIGALLFDSGETAEAT | |
| | RLKRTARRRYTRRKNRICYLQEIFSNEMAKVDDSFFHRLEESFLVEEDKKHERHPIFGNIVDEVAYHE | |
| | KYPTIYHLRKKLVDSTDKADLRLIYLALAHMIKFRGHFLIEGDLNPDNSDVDKLFIQLVQTYNQLFEE | |
| | NPINASGVDAKAILSARLSKSRRLENLIAQLPGEKKNGLFGNLIALSLGLTPNFKSNFDLAEDAKLQL | |
| | SKDTYDDDLDNLLAQIGDQYADLFLAAKNLSDAILLSDILRVNTEITKAPLSASMIKRYDEHHQDLTL | |
| | LKALVRQQLPEKYKEIFFDQSKNGYAGYIDGGASQEEFYKFIKPILEKMDGTEELLVKLNREDLLRKQ | |
| | RTFDNGSIPHQIHLGELHAILRRQEDFYPFLKDNREKIEKILTFRIPYYVGPLARGNSRFAWMTRKSE | |
| | ETITPWNFEEVVDKGASAQSFIERMTNFDKNLPNEKVLPKHSLLYEYFTVYNELTKVKYVTEGMRKPA | |
| | FLSGEQKKAIVDLLFKTNRKVTVKQLKEDYFKKIECFDSVEISGVEDRFNASLGTYHDLLKIIKDKDF | |
| | LDNEENEDILEDIVLTLTLFEDREMIEERLKTYAHLFDDKVMKQLKRRRYTGWGRLSRKLINGIRDKQ | |
| | SGKTILDFLKSDGFANRNFMQLIHDDSLTFKEDIQKAQVSGQGDSLHEHIANLAGSPAIKKGILQTVK | |
| | VVDELVKVMGRHKPENIVIEMARENQTTQKGQKNSRERMKRIEEGIKELGSQILKEHPVENTQLQNEK | |
| | LYLYYLQNGRDMYVDQELDINRLSDYDVDHIVPQSFLKDDSIDNKVLTRSDKNRGKSDNVPSEEVVKK | |
| | MKNYWRQLLNAKLITQRKFDNLTKAERGGLSELDKAGFIKRQLVETRQITKHVAQILDSRMNTKYDEN | |
| | DKLIREVKVITLKSKLVSDFRKDFQFYKVREINNYHHAHDAYLNAVVGTALIKKYPKLESEFVYGDYK | |
| | VYDVRKMIAKSEQEIGKATAKYFFYSNIMNFFKTEITLANGEIRKRPLIETNGETGEIVWDKGRDFAT | |
| | VRKVLSMPQVNIVKKTEVQTGGFSKESILPKRNSDKLIARKKDWDPKKYGGFVSPTVAYSVLVVAKVE | |
| | KGKSKKLKSVKELLGITIMERSSFEKNPIDFLEAKGYKEVKKDLIIKLPKYSLFELENGRKRMLASAR | |
| | ELQKGNELALPSKYVNFLYLASHYEKLKGSPEDNEQKQLFVEQHKHYLDEIIEQISEFSKRVILADAN | |
| | LDKVLSAYNKHRDKPIREQAENIIHLFTLTNLGAPAAFKYFDTTIDRKQYRSTKEVLDATLIHQSITG | |
| | LYETRIDLSQLGGDSGGSKRTADGSEFEPKKKRKV | |
| ABE8e | MKRTADGSEFESPKKKRKVSEVEFSHEYWMRHALTLAKRARDEREVPVGAVLVLNNRVIGEGWNRAIG | 202 |
| | LHDPTAHAEIMALRQGGLVMQNYRLIDATLYVTFEPCVMCAGAMIHSRIGRVVFGVRNSKRGAAGSLM | |
| | NVLNYPGMNHRVEITEGILADECAALLCDFYRMPRQVFNAQKKAQSSINSGGSSGGSSGSETPGTSES | |
| | ATPESSGGSSGGSDKKYSIGLAIGTNSVGWAVITDEYKVPSKKFKVLGNTDRHSIKKNLIGALLFDSG | |
| | ETAEATRLKRTARRRYTRRKNRICYLQEIFSNEMAKVDDSFFHRLEESFLVEEDKKHERHPIFGNIVD | |
| | EVAYHEKYPTIYHLRKKLVDSTDKADLRLIYLALAHMIKFRGHFLIEGDLNPDNSDVDKLFIQLVQTY | |
| | NQLFEENPINASGVDAKAILSARLSKSRRLENLIAQLPGEKKNGLFGNLIALSLGLTPNFKSNFDLAE | |
| | DAKLQLSKDTYDDDLDNLLAQIGDQYADLFLAAKNLSDAILLSDILRVNTEITKAPLSASMIKRYDEH | |
| | HQDLTLLKALVRQQLPEKYKEIFFDQSKNGYAGYIDGGASQEEFYKFIKPILEKMDGTEELLVKLNRE | |
| | DLLRKQRTFDNGSIPHQIHLGELHAILRRQEDFYPFLKDNREKIEKILTFRIPYYVGPLARGNSRFAW | |
| | MTRKSEETITPWNFEEVVDKGASAQSFIERMTNFDKNLPNEKVLPKHSLLYEYFTVYNELTKVKYVTE | |
| | GMRKPAFLSGEQKKAIVDLLFKTNRKVTVKQLKEDYFKKIECFDSVEISGVEDRFNASLGTYHDLLKI | |
| | IKDKDFLDNEENEDILEDIVLTLTLFEDREMIEERLKTYAHLFDDKVMKQLKRRRYTGWGRLSRKLIN | |
| | GIRDKQSGKTILDFLKSDGFANRNFMQLIHDDSLTFKEDIQKAQVSGQGDSLHEHIANLAGSPAIKKG | |
| | ILQTVKVVDELVKVMGRHKPENIVIEMARENQTTQKGQKNSRERMKRIEEGIKELGSQILKEHPVENT | |
| | QLQNEKLYLYYLQNGRDMYVDQELDINRLSDYDVDHIVPQSFLKDDSIDNKVLTRSDKNRGKSDNVPS | |
| | EEVVKKMKNYWRQLLNAKLITQRKFDNLTKAERGGLSELDKAGFIKRQLVETRQITKHVAQILDSRMN | |
| | TKYDENDKLIREVKVITLKSKLVSDFRKDFQFYKVREINNYHHAHDAYLNAVVGTALIKKYPKLESEF | |
| | VYGDYKVYDVRKMIAKSEQEIGKATAKYFFYSNIMNFFKTEITLANGEIRKRPLIETNGETGEIVWDK | |
| | GRDFATVRKVLSMPQVNIVKKTEVQTGGFSKESILPKRNSDKLIARKKDWDPKKYGGFDSPTVAYSVL | |
| | VVAKVEKGKSKKLKSVKELLGITIMERSSFEKNPIDFLEAKGYKEVKKDLIIKLPKYSLFELENGRKR | |
| | MLASAGELQKGNELALPSKYVNFLYLASHYEKLKGSPEDNEQKQLFVEQHKHYLDEIIEQISEFSKRV | |
| | ILADANLDKVLSAYNKHRDKPIREQAENIIHLFTLTNLGAPAAFKYFDTTIDRKRYTSTKEVLDATLI | |
| | HQSITGLYETRIDLSQLGGDSGGSKRTADGSEFEPKKKRKV | |
| ABE8e-dimer | MKRTADGSEFESPKKKRKVSEVEFSHEYWMRHALTLAKRAWDEREVPVGAVLVHNNRVIGEGWNRPIG | 203 |
| | RHDPTAHAEIMALRQGGLVMQNYRLIDATLYVTLEPCVMCAGAMIHSRIGRVVFGARDAKTGAAGSLM | |
| | DVLHHPGMNHRVEITEGILADECAALLSDFFRMRRQEIKAQKKAQSSTDSGGSSGGSSGSETPGTSES | |
| | ATPESSGGSSGGSSEVEFSHEYWMRHALTLAKRARDEREVPVGAVLVLNNRVIGEGWNRAIGLHDPTA | |
| | HAEIMALRQGGLVMQNYRLIDATLYVTFEPCVMCAGAMIHSRIGRVVFGVRNSKRGAAGSLMNVLNYP | |
| | GMNHRVEITEGILADECAALLCDFYRMPRQVFNAQKKAQSSINSGGSSGGSSGSETPGTSESATPESS | |
| | GGSSGGSDKKYSIGLAIGTNSVGWAVITDEYKVPSKKFKVLGNTDRHSIKKNLIGALLFDSGETAEAT | |
| | RLKRTARRRYTRRKNRICYLQEIFSNEMAKVDDSFFHRLEESFLVEEDKKHERHPIFGNIVDEVAYHE | |
| | KYPTIYHLRKKLVDSTDKADLRLIYLALAHMIKFRGHFLIEGDLNPDNSDVDKLFIQLVQTYNQLFEE | |
| | NPINASGVDAKAILSARLSKSRRLENLIAQLPGEKKNGLFGNLIALSLGLTPNFKSNFDLAEDAKLQL | |
| | SKDTYDDDLDNLLAQIGDQYADLFLAAKNLSDAILLSDILRVNTEITKAPLSASMIKRYDEHHQDLTL | |
| | LKALVRQQLPEKYKEIFFDQSKNGYAGYIDGGASQEEFYKFIKPILEKMDGTEELLVKLNREDLLRKQ | |
| | RTFDNGSIPHQIHLGELHAILRRQEDFYPFLKDNREKIEKILTFRIPYYVGPLARGNSRFAWMTRKSE | |
| | ETITPWNFEEVVDKGASAQSFIERMTNFDKNLPNEKVLPKHSLLYEYFTVYNELTKVKYVTEGMRKPA | |
| | FLSGEQKKAIVDLLFKTNRKVTVKQLKEDYFKKIECFDSVEISGVEDRFNASLGTYHDLLKIIKDKDF | |
| | LDNEENEDILEDIVLTLTLFEDREMIEERLKTYAHLFDDKVMKQLKRRRYTGWGRLSRKLINGIRDKQ | |
| | SGKTILDFLKSDGFANRNFMQLIHDDSLTFKEDIQKAQVSGQGDSLHEHIANLAGSPAIKKGILQTVK | |
| | VVDELVKVMGRHKPENIVIEMARENQTTQKGQKNSRERMKRIEEGIKELGSQILKEHPVENTQLQNEK | |
| | LYLYYLQNGRDMYVDQELDINRLSDYDVDHIVPQSFLKDDSIDNKVLTRSDKNRGKSDNVPSEEVVKK | |
| | MKNYWRQLLNAKLITQRKFDNLTKAERGGLSELDKAGFIKRQLVETRQITKHVAQILDSRMNTKYDEN | |
| | DKLIREVKVITLKSKLVSDFRKDFQFYKVREINNYHHAHDAYLNAVVGTALIKKYPKLESEFVYGDYK | |
| | VYDVRKMIAKSEQEIGKATAKYFFYSNIMNFFKTEITLANGEIRKRPLIETNGETGEIVWDKGRDFAT | |
| | VRKVLSMPQVNIVKKTEVQTGGFSKESILPKRNSDKLIARKKDWDPKKYGGFDSPTVAYSVLVVAKVE | |
| | KGKSKKLKSVKELLGITIMERSSFEKNPIDFLEAKGYKEVKKDLIIKLPKYSLFELENGRKRMLASAG | |
| | ELQKGNELALPSKYVNFLYLASHYEKLKGSPEDNEQKQLFVEQHKHYLDEIIEQISEFSKRVILADAN | |
| | LDKVLSAYNKHRDKPIREQAENIIHLFTLTNLGAPAAFKYFDTTIDRKRYTSTKEVLDATLIHQSITG | |
| | LYETRIDLSQLGGDSGGSKRTADGSEFEPKKKRKV | |
| SaABESe | MKRTADGSEFESPKKKRKVSEVEFSHEYWMRHALTLAKRARDEREVPVGAVLVLNNRVIGEGWNRAIG | 204 |
| | LHDPTAHAEIMALRQGGLVMQNYRLIDATLYVTFEPCVMCAGAMIHSRIGRVVFGVRNSKRGAAGSLM | |
| | NVLNYPGMNHRVEITEGILADECAALLCDFYRMPRQVFNAQKKAQSSINSGGSSGGSSGSETPGTSES | |
| | ATPESSGGSSGGSGKRNYILGLAIGITSVGYGIIDYETRDVIDAGVRLFKEANVENNEGRRSKRGARR | |
| | LKRRRRHRIQRVKKLLFDYNLLTDHSELSGINPYEARVKGLSQKLSEEEFSAALLHLAKRRGVHNVNE | |
| | VEEDTGNELSTKEQISRNSKALEEKYVAELQLERLKKDGEVRGSINRFKTSDYVKEAKQLLKVQKAYH | |
| | QLDQSFIDTYIDLLETRRTYYEGPGEGSPFGWKDIKEWYEMLMGHCTYFPEELRSVKYAYNADLYNAL | |
| | NDLNNLVITRDENEKLEYYEKFQIIENVFKQKKKPTLKQIAKEILVNEEDIKGYRVTSTGKPEFTNLK | |
| | VYHDIKDITARKEIIENAELLDQIAKILTIYQSSEDIQEELTNLNSELTQEEIEQISNLKGYTGTHNL | |
| | SLKAINLILDELWHTNDNQIAIFNRLKLVPKKVDLSQQKEIPTTLVDDFILSPVVKRSFIQSIKVINA | |
| | IIKKYGLPNDIIIELAREKNSKDAQKMINEMQKRNRQTNERIEEIIRTTGKENAKYLIEKIKLHDMQE | |
| | GKCLYSLEAIPLEDLLNNPFNYEVDHIIPRSVSFDNSFNNKVLVKQEENSKKGNRTPFQYLSSSDSKI | |
| | SYETFKKHILNLAKGKGRISKTKKEYLLEERDINRFSVQKDFINRNLVDTRYATRGLMNLLRSYFRVN | |
| | NLDVKVKSINGGFTSFLRRKWKFKKERNKGYKHHAEDALIIANADFIFKEWKKLDKAKKVMENQMFEE | |
| | KQAESMPEIETEQEYKEIFITPHQIKHIKDFKDYKYSHRVDKKPNRELINDTLYSTRKDDKGNTLIVN | |
| | NLNGLYDKDNDKLKKLINKSPEKLLMYHHDPQTYQKLKLIMEQYGDEKNPLYKYYEETGNYLTKYSKK | |
| | DNGPVIKKIKYYGNKLNAHLDITDDYPNSRNKVVKLSLKPYRFDVYLDNGVYKFVTVKNLDVIKKENY | |
| | YEVNSKCYEEAKKLKKISNQAEFIASFYNNDLIKINGELYRVIGVNNDLLNRIEVNMIDITYREYLEN | |
| | MNDKRPPRIIKTIASKTQSIKKYSTDILGNLYEVKSKKHPQIIKKGSGGSKRTADGSEFEPKKKRKV | |
| SaABESe-dimer | MKRTADGSEFESPKKKRKVSEVEFSHEYWMRHALTLAKRAWDEREVPVGAVLVHNNRVIGEGWNRPIG | 205 |
| | RHDPTAHAEIMALRQGGLVMQNYRLIDATLYVTLEPCVMCAGAMIHSRIGRVVFGARDAKTGAAGSLM | |
| | DVLHHPGMNHRVEITEGILADECAALLSDFFRMRRQEIKAQKKAQSSTDSGGSSGGSSGSETPGTSES | |
| | ATPESSGGSSGGSSEVEFSHEYWMRHALTLAKRARDEREVPVGAVLVLNNRVIGEGWNRAIGLHDPTA | |
| | HAEIMALRQGGLVMQNYRLIDATLYVTFEPCVMCAGAMIHSRIGRVVFGVRNSKRGAAGSLMNVLNYP | |
| | GMNHRVEITEGILADECAALLCDFYRMPRQVFNAQKKAQSSINSGGSSGGSSGSETPGTSESATPESS | |
| | GGSSGGSGKRNYILGLAIGITSVGYGIIDYETRDVIDAGVRLFKEANVENNEGRRSKRGARRLKRRRR | |
| | HRIQRVKKLLFDYNLLTDHSELSGINPYEARVKGLSQKLSEEEFSAALLHLAKRRGVHNVNEVEEDTG | |
| | NELSTKEQISRNSKALEEKYVAELQLERLKKDGEVRGSINRFKTSDYVKEAKQLLKVQKAYHQLDQSF | |
| | IDTYIDLLETRRTYYEGPGEGSPFGWKDIKEWYEMLMGHCTYFPEELRSVKYAYNADLYNALNDLNNL | |
| | VITRDENEKLEYYEKFQIIENVFKQKKKPTLKQIAKEILVNEEDIKGYRVTSTGKPEFTNLKVYHDIK | |
| | DITARKEIIENAELLDQIAKILTIYQSSEDIQEELTNLNSELTQEEIEQISNLKGYTGTHNLSLKAIN | |
| | LILDELWHTNDNQIAIFNRLKLVPKKVDLSQQKEIPTTLVDDFILSPVVKRSFIQSIKVINAIIKKYG | |
| | LPNDIIIELAREKNSKDAQKMINEMQKRNRQTNERIEEIIRTTGKENAKYLIEKIKLHDMQEGKCLYS | |
| | LEAIPLEDLLNNPFNYEVDHIIPRSVSFDNSFNNKVLVKQEENSKKGNRTPFQYLSSSDSKISYETFK | |
| | KHILNLAKGKGRISKTKKEYLLEERDINRFSVQKDFINRNLVDTRYATRGLMNLLRSYFRVNNLDVKV | |
| | KSINGGFTSFLRRKWKFKKERNKGYKHHAEDALIIANADFIFKEWKKLDKAKKVMENQMFEEKQAESM | |
| | PEIETEQEYKEIFITPHQIKHIKDFKDYKYSHRVDKKPNRELINDTLYSTRKDDKGNTLIVNNLNGLY | |
| | DKDNDKLKKLINKSPEKLLMYHHDPQTYQKLKLIMEQYGDEKNPLYKYYEETGNYLTKYSKKDNGPVI | |
| | KKIKYYGNKLNAHLDITDDYPNSRNKVVKLSLKPYRFDVYLDNGVYKFVTVKNLDVIKKENYYEVNSK | |
| | CYEEAKKLKKISNQAEFIASFYNNDLIKINGELYRVIGVNNDLLNRIEVNMIDITYREYLENMNDKRP | |
| | PRIIKTIASKTQSIKKYSTDILGNLYEVKSKKHPQIIKKGSGGSKRTADGSEFEPKKKRKV | |
| LbABEe | MKRTADGSEFESPKKKRKVSEVEFSHEYWMRHALTLAKRARDEREVPVGAVLVLNNRVIGEGWNRAIG | 206 |
| | LHDPTAHAEIMALRQGGLVMQNYRLIDATLYVTFEPCVMCAGAMIHSRIGRVVFGVRNSKRGAAGSLM | |
| | NVLNYPGMNHRVEITEGILADECAALLCDFYRMPRQVFNAQKKAQSSINSGGSSGGSSGSETPGTSES | |
| | ATPESSGGSSGGSSKLEKFTNCYSLSKTLRFKAIPVGKTQENIDNKRLLVEDEKRAEDYKGVKKLLDR | |
| | YYLSFINDVLHSIKLKNLNNYISLFRKKTRTEKENKELENLEINLRKEIAKAFKGNEGYKSLFKKDII | |
| | ETILPEFLDDKDEIALVNSFNGFTTAFTGFFDNRENMFSEEAKSTSIAFRCINENLTRYISNMDIFEK | |
| | VDAIFDKHEVQEIKEKILNSDYDVEDFFEGEFFNFVLTQEGIDVYNAIIGGFVTESGEKIKGLNEYIN | |
| | LYNQKTKQKLPKFKPLYKQVLSDRESLSFYGEGYTSDEEVLEVFRNTLNKNSEIFSSIKKLEKLFKNF | |
| | DEYSSAGIFVKNGPAISTISKDIFGEWNVIRDKWNAEYDDIHLKKKAVVTEKYEDDRRKSFKKIGSFS | |
| | LEQLQEYADADLSVVEKLKEIIIQKVDEIYKVYGSSEKLFDADFVLEKSLKKNDAVVAIMKDLLDSVK | |
| | SFENYIKAFFGEGKETNRDESFYGDFVLAYDILLKVDHIYDAIRNYVTQKPYSKDKFKLYFQNPQFMG | |
| | GWDKDKETDYRATILRYGSKYYLAIMDKKYAKCLQKIDKDDVNGNYEKINYKLLPGPNKMLPKVFFSK | |
| | KWMAYYNPSEDIQKIYKNGTFKKGDMFNLNDCHKLIDFFKDSISRYPKWSNAYDFNFSETEKYKDIAG | |
| | FYREVEEQGYKVSFESASKKEVDKLVEEGKLYMFQIYNKDFSDKSHGTPNLHTMYFKLLFDENNHGQI | |
| | RLSGGAELFMRRASLKKEELVVHPANSPIANKNPDNPKKTTTLSYDVYKDKRFSEDQYELHIPIAINK | |
| | CPKNIFKINTEVRVLLKHDDNPYVIGIARGERNLLYIVVVDGKGNIVEQYSLNEIINNFNGIRIKTDY | |
| | HSLLDKKEKERFEARQNWTSIENIKELKAGYISQVVHKICELVEKYDAVIALEDLNSGFKNSRVKVEK | |
| | QVYQKFEKMLIDKLNYMVDKKSNPCATGGALKGYQITNKFESFKSMSTQNGFIFYIPAWLTSKIDPST | |
| | GFVNLLKTKYTSIADSKKFISSFDRIMYVPEEDLFEFALDYKNFSRTDADYIKKWKLYSYGNRIRIFR | |
| | NPKKNNVFDWEEVCLTSAYKELFNKYGINYQQGDIRALLCEQSDKAFYSSFMALMSLMLQMRNSITGR | |
| | TDVDFLISPVKNSDGIFYDSRNYEAQENAILPKNADANGAYNIARKVLWAIGQFKKAEDEKLDKVKIA | |
| | ISNKEWLEYAQTSVKSGGSKRTADGSEFEPKKKRKV | |
| LbABE8e-dimer | MKRTADGSEFESPKKKRKVSEVEFSHEYWMRHALTLAKRAWDEREVPVGAVLVHNNRVIGEGWNRPIG | 207 |
| | RHDPTAHAEIMALRQGGLVMQNYRLIDATLYVTLEPCVMCAGAMIHSRIGRVVFGARDAKTGAAGSLM | |
| | DVLHHPGMNHRVEITEGILADECAALLSDFFRMRRQEIKAQKKAQSSTDSGGSSGGSSGSETPGTSES | |
| | ATPESSGGSSGGSSEVEFSHEYWMRHALTLAKRARDEREVPVGAVLVLNNRVIGEGWNRAIGLHDPTA | |
| | HAEIMALRQGGLVMQNYRLIDATLYVTFEPCVMCAGAMIHSRIGRVVFGVRNSKRGAAGSLMNVLNYP | |
| | GMNHRVEITEGILADECAALLCDFYRMPRQVFNAQKKAQSSINSGGSSGGSSGSETPGTSESATPESS | |
| | GGSSGGSSKLEKFTNCYSLSKTLRFKAIPVGKTQENIDNKRLLVEDEKRAEDYKGVKKLLDRYYLSFI | |
| | NDVLHSIKLKNLNNYISLFRKKTRTEKENKELENLEINLRKEIAKAFKGNEGYKSLFKKDIIETILPE | |
| | FLDDKDEIALVNSFNGFTTAFTGFFDNRENMFSEEAKSTSIAFRCINENLTRYISNMDIFEKVDAIFD | |
| | KHEVQEIKEKILNSDYDVEDFFEGEFFNFVLTQEGIDVYNAIIGGFVTESGEKIKGLNEYINLYNQKT | |
| | KQKLPKFKPLYKQVLSDRESLSFYGEGYTSDEEVLEVFRNTLNKNSEIFSSIKKLEKLFKNFDEYSSA | |
| | GIFVKNGPAISTISKDIFGEWNVIRDKWNAEYDDIHLKKKAVVTEKYEDDRRKSFKKIGSFSLEQLQE | |
| | YADADLSVVEKLKEIIIQKVDEIYKVYGSSEKLFDADFVLEKSLKKNDAVVAIMKDLLDSVKSFENYI | |
| | KAFFGEGKETNRDESFYGDFVLAYDILLKVDHIYDAIRNYVTQKPYSKDKFKLYFQNPQFMGGWDKDK | |
| | ETDYRATILRYGSKYYLAIMDKKYAKCLQKIDKDDVNGNYEKINYKLLPGPNKMLPKVFFSKKWMAYY | |
| | NPSEDIQKIYKNGTFKKGDMFNLNDCHKLIDFFKDSISRYPKWSNAYDFNFSETEKYKDIAGFYREVE | |
| | EQGYKVSFESASKKEVDKLVEEGKLYMFQIYNKDFSDKSHGTPNLHTMYFKLLFDENNHGQIRLSGGA | |
| | ELFMRRASLKKEELVVHPANSPIANKNPDNPKKTTTLSYDVYKDKRFSEDQYELHIPIAINKCPKNIF | |
| | KINTEVRVLLKHDDNPYVIGIARGERNLLYIVVVDGKGNIVEQYSLNEIINNFNGIRIKTDYHSLLDK | |
| | KEKERFEARQNWTSIENIKELKAGYISQVVHKICELVEKYDAVIALEDLNSGFKNSRVKVEKQVYQKF | |
| | EKMLIDKLNYMVDKKSNPCATGGALKGYQITNKFESFKSMSTQNGFIFYIPAWLTSKIDPSTGFVNLL | |
| | KTKYTSIADSKKFISSFDRIMYVPEEDLFEFALDYKNFSRTDADYIKKWKLYSYGNRIRIFRNPKKNN | |
| | VFDWEEVCLTSAYKELFNKYGINYQQGDIRALLCEQSDKAFYSSFMALMSLMLQMRNSITGRTDVDFL | |
| | ISPVKNSDGIFYDSRNYEAQENAILPKNADANGAYNIARKVLWAIGQFKKAEDEKLDKVKIAISNKEW | |
| | LEYAQTSVKSGGSKRTADGSEFEPKKKRKV | |
| LbABE7.10 | MKRTADGSEFESPKKKRKVSEVEFSHEYWMRHALTLAKRAWDEREVPVGAVLVHNNRVIGEGWNRPIG | 208 |
| | RHDPTAHAEIMALRQGGLVMQNYRLIDATLYVTLEPCVMCAGAMIHSRIGRVVFGARDAKTGAAGSLM | |
| | DVLHHPGMNHRVEITEGILADECAALLSDFFRMRRQEIKAQKKAQSSTDSGGSSGGSSGSETPGTSES | |
| | ATPESSGGSSGGSSEVEFSHEYWMRHALTLAKRARDEREVPVGAVLVLNNRVIGEGWNRAIGLHDPTA | |
| | HAEIMALRQGGLVMQNYRLIDATLYVTFEPCVMCAGAMIHSRIGRVVFGVRNAKTGAAGSLMDVLHYP | |
| | GMNHRVEITEGILADECAALLCYFFRMPRQVFNAQKKAQSSTDSGGSSGGSSGSETPGTSESATPESS | |
| | GGSSGGSSKLEKFTNCYSLSKTLRFKAIPVGKTQENIDNKRLLVEDEKRAEDYKGVKKLLDRYYLSFI | |
| | NDVLHSIKLKNLNNYISLFRKKTRTEKENKELENLEINLRKEIAKAFKGNEGYKSLFKKDIIETILPE | |
| | FLDDKDEIALVNSFNGFTTAFTGFFDNRENMFSEEAKSTSIAFRCINENLTRYISNMDIFEKVDAIFD | |
| | KHEVQEIKEKILNSDYDVEDFFEGEFFNFVLTQEGIDVYNAIIGGFVTESGEKIKGLNEYINLYNQKT | |
| | KQKLPKFKPLYKQVLSDRESLSFYGEGYTSDEEVLEVFRNTLNKNSEIFSSIKKLEKLFKNFDEYSSA | |
| | GIFVKNGPAISTISKDIFGEWNVIRDKWNAEYDDIHLKKKAVVTEKYEDDRRKSFKKIGSFSLEQLQE | |
| | YADADLSVVEKLKEIIIQKVDEIYKVYGSSEKLFDADFVLEKSLKKNDAVVAIMKDLLDSVKSFENYI | |
| | KAFFGEGKETNRDESFYGDFVLAYDILLKVDHIYDAIRNYVTQKPYSKDKFKLYFQNPQFMGGWDKDK | |
| | ETDYRATILRYGSKYYLAIMDKKYAKCLQKIDKDDVNGNYEKINYKLLPGPNKMLPKVFFSKKWMAYY | |
| | NPSEDIQKIYKNGTFKKGDMFNLNDCHKLIDFFKDSISRYPKWSNAYDFNFSETEKYKDIAGFYREVE | |
| | EQGYKVSFESASKKEVDKLVEEGKLYMFQIYNKDFSDKSHGTPNLHTMYFKLLFDENNHGQIRLSGGA | |
| | ELFMRRASLKKEELVVHPANSPIANKNPDNPKKTTTLSYDVYKDKRFSEDQYELHIPIAINKCPKNIF | |
| | KINTEVRVLLKHDDNPYVIGIARGERNLLYIVVVDGKGNIVEQYSLNEIINNFNGIRIKTDYHSLLDK | |
| | KEKERFEARQNWTSIENIKELKAGYISQVVHKICELVEKYDAVIALEDLNSGFKNSRVKVEKQVYQKF | |
| | EKMLIDKLNYMVDKKSNPCATGGALKGYQITNKFESFKSMSTQNGFIFYIPAWLTSKIDPSTGFVNLL | |
| | KTKYTSIADSKKFISSFDRIMYVPEEDLFEFALDYKNFSRTDADYIKKWKLYSYGNRIRIFRNPKKNN | |
| | VFDWEEVCLTSAYKELFNKYGINYQQGDIRALLCEQSDKAFYSSFMALMSLMLQMRNSITGRTDVDFL | |
| | ISPVKNSDGIFYDSRNYEAQENAILPKNADANGAYNIARKVLWAIGQFKKAEDEKLDKVKIAISNKEW | |
| | LEYAQTSVKSGGSKRTADGSEFEPKKKRKV | |
| enAsABE8e | MKRTADGSEFESPKKKRKVSEVEFSHEYWMRHALTLAKRARDEREVPVGAVLVLNNRVIGEGWNRAIG | 209 |
| | LHDPTAHAEIMALRQGGLVMQNYRLIDATLYVTFEPCVMCAGAMIHSRIGRVVFGVRNSKRGAAGSLM | |
| | NVLNYPGMNHRVEITEGILADECAALLCDFYRMPRQVFNAQKKAQSSINSGGSSGGSSGSETPGTSES | |
| | ATPESSGGSSGGSMTQFEGFTNLYQVSKTLRFELIPQGKTLKHIQEQGFIEEDKARNDHYKELKPIID | |
| | RIYKTYADQCLQLVQLDWENLSAAIDSYRKEKTEETRNALIEEQATYRNAIHDYFIGRTDNLTDAINK | |
| | RHAEIYKGLFKAELFNGKVLKQLGTVTTTEHENALLRSFDKFTTYFSGFYRNRKNVFSAEDISTAIPH | |
| | RIVQDNFPKFKENCHIFTRLITAVPSLREHFENVKKAIGIFVSTSIEEVFSFPFYNQLLTQTQIDLYN | |
| | QLLGGISREAGTEKIKGLNEVLNLAIQKNDETAHIIASLPHRFIPLFKQILSDRNTLSFILEEFKSDE | |
| | EVIQSFCKYKTLLRNENVLETAEALFNELNSIDLTHIFISHKKLETISSALCDHWDTLRNALYERRIS | |
| | ELTGKITKSAKEKVQRSLKHEDINLQEIISAAGKELSEAFKQKTSEILSHAHAALDQPLPTTLKKQEE | |
| | KEILKSQLDSLLGLYHLLDWFAVDESNEVDPEFSARLTGIKLEMEPSLSFYNKARNYATKKPYSVEKF | |
| | KLNFQMPTLARGWDVNREKNNGAILFVKNGLYYLGIMPKQKGRYKALSFEPTEKTSEGFDKMYYDYFP | |
| | DAAKMIPKCSTQLKAVTAHFQTHTTPILLSNNFIEPLEITKEIYDLNNPEKEPKKFQTAYAKKTGDQK | |
| | GYREALCKWIDFTRDFLSKYTKTTSIDLSSLRPSSQYKDLGEYYAELNPLLYHISFQRIAEKEIMDAV | |
| | ETGKLYLFQIYNKDFAKGHHGKPNLHTLYWTGLFSPENLAKTSIKLNGQAELFYRPKSRMKRMAHRLG | |
| | EKMLNKKLKDQKTPIPDTLYQELYDYVNHRLSHDLSDEARALLPNVITKEVSHEIIKDRRFTSDKFFF | |
| | HVPITLNYQAANSPSKFNQRVNAYLKEHPETPIIGIARGERNLIYITVIDSTGKILEQRSLNTIQQFD | |
| | YQKKLDNREKERVAARQAWSVVGTIKDLKQGYLSQVIHEIVDLMIHYQAVVVLENLNFGFKSKRTGIA | |
| | EKAVYQQFEKMLIDKLNCLVLKDYPAEKVGGVLNPYQLTDQFTSFAKMGTQSGFLFYVPAPYTSKIDP | |
| | LTGFVDPFVWKTIKNHESRKHFLEGFDFLHYDVKTGDFILHFKMNRNLSFQRGLPGFMPAWDIVFEKN | |
| | ETQFDAKGTPFIAGKRIVPVIENHRFTGRYRDLYPANELIALLEEKGIVFRDGSNILPKLLENDDSHA | |
| | IDTMVALIRSVLQMRNSNAATGEDYINSPVRDLNGVCFDSRFQNPEWPMDADANGAYHIALKGQLLLN | |
| | HLKESKDLKLQNGISNQDWLAYIQELRNSGGSKRTADGSEFEPKKKRKV | |
| enAsABE8e- | MKRTADGSEFESPKKKRKVSEVEFSHEYWMRHALTLAKRAWDEREVPVGAVLVHNNRVIGEGWNRPIG | 210 |
| dimer | RHDPTAHAEIMALRQGGLVMQNYRLIDATLYVTLEPCVMCAGAMIHSRIGRVVFGARDAKTGAAGSLM | |
| | DVLHHPGMNHRVEITEGILADECAALLSDFFRMRRQEIKAQKKAQSSTDSGGSSGGSSGSETPGTSES | |
| | ATPESSGGSSGGSSEVEFSHEYWMRHALTLAKRARDEREVPVGAVLVLNNRVIGEGWNRAIGLHDPTA | |
| | HAEIMALRQGGLVMQNYRLIDATLYVTFEPCVMCAGAMIHSRIGRVVFGVRNSKRGAAGSLMNVLNYP | |
| | GMNHRVEITEGILADECAALLCDFYRMPRQVFNAQKKAQSSINSGGSSGGSSGSETPGTSESATPESS | |
| | GGSSGGSMTQFEGFTNLYQVSKTLRFELIPQGKTLKHIQEQGFIEEDKARNDHYKELKPIIDRIYKTY | |
| | ADQCLQLVQLDWENLSAAIDSYRKEKTEETRNALIEEQATYRNAIHDYFIGRTDNLTDAINKRHAEIY | |
| | KGLFKAELFNGKVLKQLGTVTTTEHENALLRSFDKFTTYFSGFYRNRKNVFSAEDISTAIPHRIVQDN | |
| | FPKFKENCHIFTRLITAVPSLREHFENVKKAIGIFVSTSIEEVFSFPFYNQLLTQTQIDLYNQLLGGI | |
| | SREAGTEKIKGLNEVLNLAIQKNDETAHIIASLPHRFIPLFKQILSDRNTLSFILEEFKSDEEVIQSF | |
| | CKYKTLLRNENVLETAEALFNELNSIDLTHIFISHKKLETISSALCDHWDTLRNALYERRISELTGKI | |
| | TKSAKEKVQRSLKHEDINLQEIISAAGKELSEAFKQKTSEILSHAHAALDQPLPTTLKKQEEKEILKS | |
| | QLDSLLGLYHLLDWFAVDESNEVDPEFSARLTGIKLEMEPSLSFYNKARNYATKKPYSVEKFKLNFQM | |
| | PTLARGWDVNREKNNGAILFVKNGLYYLGIMPKQKGRYKALSFEPTEKTSEGFDKMYYDYFPDAAKMI | |
| | PKCSTQLKAVTAHFQTHTTPILLSNNFIEPLEITKEIYDLNNPEKEPKKFQTAYAKKTGDQKGYREAL | |
| | CKWIDFTRDFLSKYTKTTSIDLSSLRPSSQYKDLGEYYAELNPLLYHISFQRIAEKEIMDAVETGKLY | |
| | LFQIYNKDFAKGHHGKPNLHTLYWTGLFSPENLAKTSIKLNGQAELFYRPKSRMKRMAHRLGEKMLNK | |
| | KLKDQKTPIPDTLYQELYDYVNHRLSHDLSDEARALLPNVITKEVSHEIIKDRRFTSDKFFFHVPITL | |
| | NYQAANSPSKFNQRVNAYLKEHPETPIIGIARGERNLIYITVIDSTGKILEQRSLNTIQQFDYQKKLD | |
| | NREKERVAARQAWSVVGTIKDLKQGYLSQVIHEIVDLMIHYQAVVVLENLNFGFKSKRTGIAEKAVYQ | |
| | QFEKMLIDKLNCLVLKDYPAEKVGGVLNPYQLTDQFTSFAKMGTQSGFLFYVPAPYTSKIDPLTGFVD | |
| | PFVWKTIKNHESRKHFLEGFDFLHYDVKTGDFILHFKMNRNLSFQRGLPGFMPAWDIVFEKNETQFDA | |
| | KGTPFIAGKRIVPVIENHRFTGRYRDLYPANELIALLEEKGIVFRDGSNILPKLLENDDSHAIDTMVA | |
| | LIRSVLQMRNSNAATGEDYINSPVRDLNGVCFDSRFQNPEWPMDADANGAYHIALKGQLLLNHLKESK | |
| | DLKLQNGISNQDWLAYIQELRNSGGSKRTADGSEFEPKKKRKV | |
| enAsABE7 . 10 | MKRTADGSEFESPKKKRKVSEVEFSHEYWMRHALTLAKRAWDEREVPVGAVLVHNNRVIGEGWNRPIG | 211 |
| | RHDPTAHAEIMALRQGGLVMQNYRLIDATLYVTLEPCVMCAGAMIHSRIGRVVFGARDAKTGAAGSLM | |
| | DVLHHPGMNHRVEITEGILADECAALLSDFFRMRRQEIKAQKKAQSSTDSGGSSGGSSGSETPGTSES | |
| | ATPESSGGSSGGSSEVEFSHEYWMRHALTLAKRARDEREVPVGAVLVLNNRVIGEGWNRAIGLHDPTA | |
| | HAEIMALRQGGLVMQNYRLIDATLYVTFEPCVMCAGAMIHSRIGRVVFGVRNAKTGAAGSLMDVLHYP | |
| | GMNHRVEITEGILADECAALLCYFFRMPRQVFNAQKKAQSSTDSGGSSGGSSGSETPGTSESATPESS | |
| | GGSSGGSMTQFEGFTNLYQVSKTLRFELIPQGKTLKHIQEQGFIEEDKARNDHYKELKPIIDRIYKTY | |
| | ADQCLQLVQLDWENLSAAIDSYRKEKTEETRNALIEEQATYRNAIHDYFIGRTDNLTDAINKRHAEIY | |
| | KGLFKAELFNGKVLKQLGTVTTTEHENALLRSFDKFTTYFSGFYRNRKNVFSAEDISTAIPHRIVQDN | |
| | FPKFKENCHIFTRLITAVPSLREHFENVKKAIGIFVSTSIEEVFSFPFYNQLLTQTQIDLYNQLLGGI | |
| | SREAGTEKIKGLNEVLNLAIQKNDETAHIIASLPHRFIPLFKQILSDRNTLSFILEEFKSDEEVIQSF | |
| | CKYKTLLRNENVLETAEALFNELNSIDLTHIFISHKKLETISSALCDHWDTLRNALYERRISELTGKI | |
| | TKSAKEKVQRSLKHEDINLQEIISAAGKELSEAFKQKTSEILSHAHAALDQPLPTTLKKQEEKEILKS | |
| | QLDSLLGLYHLLDWFAVDESNEVDPEFSARLTGIKLEMEPSLSFYNKARNYATKKPYSVEKFKLNFQM | |
| | PTLARGWDVNREKNNGAILFVKNGLYYLGIMPKQKGRYKALSFEPTEKTSEGFDKMYYDYFPDAAKMI | |
| | PKCSTQLKAVTAHFQTHTTPILLSNNFIEPLEITKEIYDLNNPEKEPKKFQTAYAKKTGDQKGYREAL | |
| | CKWIDFTRDFLSKYTKTTSIDLSSLRPSSQYKDLGEYYAELNPLLYHISFQRIAEKEIMDAVETGKLY | |
| | LFQIYNKDFAKGHHGKPNLHTLYWTGLFSPENLAKTSIKLNGQAELFYRPKSRMKRMAHRLGEKMLNK | |
| | KLKDQKTPIPDTLYQELYDYVNHRLSHDLSDEARALLPNVITKEVSHEIIKDRRFTSDKFFFHVPITL | |
| | NYQAANSPSKFNQRVNAYLKEHPETPIIGIARGERNLIYITVIDSTGKILEQRSLNTIQQFDYQKKLD | |
| | NREKERVAARQAWSVVGTIKDLKQGYLSQVIHEIVDLMIHYQAVVVLENLNFGFKSKRTGIAEKAVYQ | |
| | QFEKMLIDKLNCLVLKDYPAEKVGGVLNPYQLTDQFTSFAKMGTQSGFLFYVPAPYTSKIDPLTGFVD | |
| | PFVWKTIKNHESRKHFLEGFDFLHYDVKTGDFILHFKMNRNLSFQRGLPGFMPAWDIVFEKNETQFDA | |
| | KGTPFIAGKRIVPVIENHRFTGRYRDLYPANELIALLEEKGIVFRDGSNILPKLLENDDSHAIDTMVA | |
| | LIRSVLQMRNSNAATGEDYINSPVRDLNGVCFDSRFQNPEWPMDADANGAYHIALKGQLLLNHLKESK | |
| | DLKLQNGISNQDWLAYIQELRNSGGSKRTADGSEFEPKKKRKV | |
| SpCas9NG-ABE8e | MKRTADGSEFESPKKKRKVSEVEFSHEYWMRHALTLAKRARDEREVPVGAVLVLNNRVIGEGWNRAIG | 212 |
| (″NG-ABE8e″) | LHDPTAHAEIMALRQGGLVMQNYRLIDATLYVTFEPCVMCAGAMIHSRIGRVVFGVRNSKRGAAGSLM | |
| | NVLNYPGMNHRVEITEGILADECAALLCDFYRMPRQVFNAQKKAQSSINSGGSSGGSSGSETPGTSES | |
| | ATPESSGGSSGGSDKKYSIGLAIGTNSVGWAVITDEYKVPSKKFKVLGNTDRHSIKKNLIGALLFDSG | |
| | ETAEATRLKRTARRRYTRRKNRICYLQEIFSNEMAKVDDSFFHRLEESFLVEEDKKHERHPIFGNIVD | |
| | EVAYHEKYPTIYHLRKKLVDSTDKADLRLIYLALAHMIKFRGHFLIEGDLNPDNSDVDKLFIQLVQTY | |
| | NQLFEENPINASGVDAKAILSARLSKSRRLENLIAQLPGEKKNGLFGNLIALSLGLTPNFKSNFDLAE | |
| | DAKLQLSKDTYDDDLDNLLAQIGDQYADLFLAAKNLSDAILLSDILRVNTEITKAPLSASMIKRYDEH | |
| | HQDLTLLKALVRQQLPEKYKEIFFDQSKNGYAGYIDGGASQEEFYKFIKPILEKMDGTEELLVKLNRE | |
| | DLLRKQRTFDNGSIPHQIHLGELHAILRRQEDFYPFLKDNREKIEKILTFRIPYYVGPLARGNSRFAW | |
| | MTRKSEETITPWNFEEVVDKGASAQSFIERMTNFDKNLPNEKVLPKHSLLYEYFTVYNELTKVKYVTE | |
| | GMRKPAFLSGEQKKAIVDLLFKTNRKVTVKQLKEDYFKKIECFDSVEISGVEDRFNASLGTYHDLLKI | |
| | IKDKDFLDNEENEDILEDIVLTLTLFEDREMIEERLKTYAHLFDDKVMKQLKRRRYTGWGRLSRKLIN | |
| | GIRDKQSGKTILDFLKSDGFANRNFMQLIHDDSLTFKEDIQKAQVSGQGDSLHEHIANLAGSPAIKKG | |
| | ILQTVKVVDELVKVMGRHKPENIVIEMARENQTTQKGQKNSRERMKRIEEGIKELGSQILKEHPVENT | |
| | QLQNEKLYLYYLQNGRDMYVDQELDINRLSDYDVDHIVPQSFLKDDSIDNKVLTRSDKNRGKSDNVPS | |
| | EEVVKKMKNYWRQLLNAKLITQRKFDNLTKAERGGLSELDKAGFIKRQLVETRQITKHVAQILDSRMN | |
| | TKYDENDKLIREVKVITLKSKLVSDFRKDFQFYKVREINNYHHAHDAYLNAVVGTALIKKYPKLESEF | |
| | VYGDYKVYDVRKMIAKSEQEIGKATAKYFFYSNIMNFFKTEITLANGEIRKRPLIETNGETGEIVWDK | |
| | GRDFATVRKVLSMPQVNIVKKTEVQTGGFSKESIRPKRNSDKLIARKKDWDPKKYGGFVSPTVAYSVL | |
| | VVAKVEKGKSKKLKSVKELLGITIMERSSFEKNPIDFLEAKGYKEVKKDLIIKLPKYSLFELENGRKR | |
| | MLASARFLQKGNELALPSKYVNFLYLASHYEKLKGSPEDNEQKQLFVEQHKHYLDEIIEQISEFSKRV | |
| | ILADANLDKVLSAYNKHRDKPIREQAENIIHLFTLTNLGAPRAFKYFDTTIDRKVYRSTKEVLDATLI | |
| | HQSITGLYETRIDLSQLGGDSGGSKRTADGSEFEPKKKRKV | |
| NG-ABE8e-dimer | MKRTADGSEFESPKKKRKVSEVEFSHEYWMRHALTLAKRAWDEREVPVGAVLVHNNRVIGEGWNRPIG | 213 |
| | RHDPTAHAEIMALRQGGLVMQNYRLIDATLYVTLEPCVMCAGAMIHSRIGRVVFGARDAKTGAAGSLM | |
| | DVLHHPGMNHRVEITEGILADECAALLSDFFRMRRQEIKAQKKAQSSTDSGGSSGGSSGSETPGTSES | |
| | ATPESSGGSSGGSSEVEFSHEYWMRHALTLAKRARDEREVPVGAVLVLNNRVIGEGWNRAIGLHDPTA | |
| | HAEIMALRQGGLVMQNYRLIDATLYVTFEPCVMCAGAMIHSRIGRVVFGVRNSKRGAAGSLMNVLNYP | |
| | GMNHRVEITEGILADECAALLCDFYRMPRQVFNAQKKAQSSINSGGSSGGSSGSETPGTSESATPESS | |
| | GGSSGGSDKKYSIGLAIGTNSVGWAVITDEYKVPSKKFKVLGNTDRHSIKKNLIGALLFDSGETAEAT | |
| | RLKRTARRRYTRRKNRICYLQEIFSNEMAKVDDSFFHRLEESFLVEEDKKHERHPIFGNIVDEVAYHE | |
| | KYPTIYHLRKKLVDSTDKADLRLIYLALAHMIKFRGHFLIEGDLNPDNSDVDKLFIQLVQTYNQLFEE | |
| | NPINASGVDAKAILSARLSKSRRLENLIAQLPGEKKNGLFGNLIALSLGLTPNFKSNFDLAEDAKLQL | |
| | SKDTYDDDLDNLLAQIGDQYADLFLAAKNLSDAILLSDILRVNTEITKAPLSASMIKRYDEHHQDLTL | |
| | LKALVRQQLPEKYKEIFFDQSKNGYAGYIDGGASQEEFYKFIKPILEKMDGTEELLVKLNREDLLRKQ | |
| | RTFDNGSIPHQIHLGELHAILRRQEDFYPFLKDNREKIEKILTFRIPYYVGPLARGNSRFAWMTRKSE | |
| | ETITPWNFEEVVDKGASAQSFIERMTNFDKNLPNEKVLPKHSLLYEYFTVYNELTKVKYVTEGMRKPA | |
| | FLSGEQKKAIVDLLFKTNRKVTVKQLKEDYFKKIECFDSVEISGVEDRFNASLGTYHDLLKIIKDKDF | |
| | LDNEENEDILEDIVLTLTLFEDREMIEERLKTYAHLFDDKVMKQLKRRRYTGWGRLSRKLINGIRDKQ | |
| | SGKTILDFLKSDGFANRNFMQLIHDDSLTFKEDIQKAQVSGQGDSLHEHIANLAGSPAIKKGILQTVK | |
| | VVDELVKVMGRHKPENIVIEMARENQTTQKGQKNSRERMKRIEEGIKELGSQILKEHPVENTQLQNEK | |
| | LYLYYLQNGRDMYVDQELDINRLSDYDVDHIVPQSFLKDDSIDNKVLTRSDKNRGKSDNVPSEEVVKK | |
| | MKNYWRQLLNAKLITQRKFDNLTKAERGGLSELDKAGFIKRQLVETRQITKHVAQILDSRMNTKYDEN | |
| | DKLIREVKVITLKSKLVSDFRKDFQFYKVREINNYHHAHDAYLNAVVGTALIKKYPKLESEFVYGDYK | |
| | VYDVRKMIAKSEQEIGKATAKYFFYSNIMNFFKTEITLANGEIRKRPLIETNGETGEIVWDKGRDFAT | |
| | VRKVLSMPQVNIVKKTEVQTGGFSKESIRPKRNSDKLIARKKDWDPKKYGGFVSPTVAYSVLVVAKVE | |
| | KGKSKKLKSVKELLGITIMERSSFEKNPIDFLEAKGYKEVKKDLIIKLPKYSLFELENGRKRMLASAR | |
| | FLQKGNELALPSKYVNFLYLASHYEKLKGSPEDNEQKQLFVEQHKHYLDEIIEQISEFSKRVILADAN | |
| | LDKVLSAYNKHRDKPIREQAENIIHLFTLTNLGAPRAFKYFDTTIDRKVYRSTKEVLDATLIHQSITG | |
| | LYETRIDLSQLGGDSGGSKRTADGSEFEPKKKRKV | |
| SaKKH-ABEe | MKRTADGSEFESPKKKRKVSEVEFSHEYWMRHALTLAKRARDEREVPVGAVLVLNNRVIGEGWNRAIG | 214 |
| (″KKH-ABE8e″) | LHDPTAHAEIMALRQGGLVMQNYRLIDATLYVTFEPCVMCAGAMIHSRIGRVVFGVRNSKRGAAGSLM | |
| | NVLNYPGMNHRVEITEGILADECAALLCDFYRMPRQVFNAQKKAQSSINSGGSSGGSSGSETPGTSES | |
| | ATPESSGGSSGGSGKRNYILGLAIGITSVGYGIIDYETRDVIDAGVRLFKEANVENNEGRRSKRGARR | |
| | LKRRRRHRIQRVKKLLFDYNLLTDHSELSGINPYEARVKGLSQKLSEEEFSAALLHLAKRRGVHNVNE | |
| | VEEDTGNELSTKEQISRNSKALEEKYVAELQLERLKKDGEVRGSINRFKTSDYVKEAKQLLKVQKAYH | |
| | QLDQSFIDTYIDLLETRRTYYEGPGEGSPFGWKDIKEWYEMLMGHCTYFPEELRSVKYAYNADLYNAL | |
| | NDLNNLVITRDENEKLEYYEKFQIIENVFKQKKKPTLKQIAKEILVNEEDIKGYRVTSTGKPEFTNLK | |
| | VYHDIKDITARKEIIENAELLDQIAKILTIYQSSEDIQEELTNLNSELTQEEIEQISNLKGYTGTHNL | |
| | SLKAINLILDELWHTNDNQIAI FNRLKLVPKKVDLSQQKEIPTTLVDDFILSPWKRSFIQSIKVINA | |
| | IIKKYGLPNDIIIELAREKNSKDAQKMINEMQKRNRQTNERIEEIIRTTGKENAKYLIEKIKLHDMQE | |
| | GKCLYSLEAIPLEDLLNNPFNYEVDHIIPRSVSFDNSFNNKVLVKQEENSKKGNRTPFQYLSSSDSKI | |
| | SYETFKKHILNLAKGKGRISKTKKEYLLEERDINRFSVQKDFINRNLVDTRYATRGLMNLLRSYFRVN | |
| | NLDVKVKSINGGFTSFLRRKWKFKKERNKGYKHHAEDALIIANADFIFKEWKKLDKAKKVMENQMFEE | |
| | KQAESMPEIETEQEYKEIFITPHQIKHIKDFKDYKYSHRVDKKPNRELINDTLYSTRKDDKGNTLIVN | |
| | NLNGLYDKDNDKLKKLINKSPEKLLMYHHDPQTYQKLKLIMEQYGDEKNPLYKYYEETGNYLTKYSKK | |
| | DNGPVIKKIKYYGNKLNAHLDITDDYPNSRNKVVKLSLKPYRFDVYLDNGVYKFVTVKNLDVIKKENY | |
| | YEVNSKCYEEAKKLKKISNQAEFIASFYNNDLIKINGELYRVIGVNNDLLNRIEVNMIDITYREYLEN | |
| | MNDKRPPRIIKTIASKTQSIKKYSTDILGNLYEVKSKKHPQIIKKGSGGSKRTADGSEFEPKKKRKV | |
| SaKKH-ABE8e- | MKRTADGSEFESPKKKRKVSEVEFSHEYWMRHALTLAKRAWDEREVPVGAVLVHNNRVIGEGWNRPIG | 215 |
| dimer | RHDPTAHAEIMALRQGGLVMQNYRLIDATLYVTLEPCVMCAGAMIHSRIGRVVFGARDAKTGAAGSLM | |
| | DVLHHPGMNHRVEITEGILADECAALLSDFFRMRRQEIKAQKKAQSSTDSGGSSGGSSGSETPGTSES | |
| | ATPESSGGSSGGSSEVEFSHEYWMRHALTLAKRARDEREVPVGAVLVLNNRVIGEGWNRAIGLHDPTA | |
| | HAEIMALRQGGLVMQNYRLIDATLYVTFEPCVMCAGAMIHSRIGRVVFGVRNSKRGAAGSLMNVLNYP | |
| | GMNHRVEITEGILADECAALLCDFYRMPRQVFNAQKKAQSSINSGGSSGGSSGSETPGTSESATPESS | |
| | GGSSGGSGKRNYILGLAIGITSVGYGIIDYETRDVIDAGVRLFKEANVENNEGRRSKRGARRLKRRRR | |
| | HRIQRVKKLLFDYNLLTDHSELSGINPYEARVKGLSQKLSEEEFSAALLHLAKRRGVHNVNEVEEDTG | |
| | NELSTKEQISRNSKALEEKYVAELQLERLKKDGEVRGSINRFKTSDYVKEAKQLLKVQKAYHQLDQSF | |
| | IDTYIDLLETRRTYYEGPGEGSPFGWKDIKEWYEMLMGHCTYFPEELRSVKYAYNADLYNALNDLNNL | |
| | VITRDENEKLEYYEKFQIIENVFKQKKKPTLKQIAKEILVNEEDIKGYRVTSTGKPEFTNLKVYHDIK | |
| | DITARKEIIENAELLDQIAKILTIYQSSEDIQEELTNLNSELTQEEIEQISNLKGYTGTHNLSLKAIN | |
| | LILDELWHTNDNQIAIFNRLKLVPKKVDLSQQKEIPTTLVDDFILSPVVKRSFIQSIKVINAIIKKYG | |
| | LPNDIIIELAREKNSKDAQKMINEMQKRNRQTNERIEEIIRTTGKENAKYLIEKIKLHDMQEGKCLYS | |
| | LEAIPLEDLLNNPFNYEVDHIIPRSVSFDNSFNNKVLVKQEENSKKGNRTPFQYLSSSDSKISYETFK | |
| | KHILNLAKGKGRISKTKKEYLLEERDINRFSVQKDFINRNLVDTRYATRGLMNLLRSYFRVNNLDVKV | |
| | KSINGGFTSFLRRKWKFKKERNKGYKHHAEDALIIANADFIFKEWKKLDKAKKVMENQMFEEKQAESM | |
| | PEIETEQEYKEIFITPHQIKHIKDFKDYKYSHRVDKKPNRELINDTLYSTRKDDKGNTLIVNNLNGLY | |
| | DKDNDKLKKLINKSPEKLLMYHHDPQTYQKLKLIMEQYGDEKNPLYKYYEETGNYLTKYSKKDNGPVI | |
| | KKIKYYGNKLNAHLDITDDYPNSRNKVVKLSLKPYRFDVYLDNGVYKFVTVKNLDVIKKENYYEVNSK | |
| | CYEEAKKLKKISNQAEFIASFYNNDLIKINGELYRVIGVNNDLLNRIEVNMIDITYREYLENMNDKRP | |
| | PRIIKTIASKTQSIKKYSTDILGNLYEVKSKKHPQIIKKGSGGSKRTADGSEFEPKKKRKV | |
| CP1028-ABE8e | MKRTADGSEFESPKKKRKVSEVEFSHEYWMRHALTLAKRARDEREVPVGAVLVLNNRVIGEGWNRAIG | 216 |
| | LHDPTAHAEIMALRQGGLVMQNYRLIDATLYVTFEPCVMCAGAMIHSRIGRVVFGVRNSKRGAAGSLM | |
| | NVLNYPGMNHRVEITEGILADECAALLCDFYRMPRQVFNAQKKAQSSINSGGSSGGSSGSETPGTSES | |
| | ATPESSGGSSGGSEIGKATAKYFFYSNIMNFFKTEITLANGEIRKRPLIETNGETGEIVWDKGRDFAT | |
| | VRKVLSMPQVNIVKKTEVQTGGFSKESILPKRNSDKLIARKKDWDPKKYGGFDSPTVAYSVLVVAKVE | |
| | KGKSKKLKSVKELLGITIMERSSFEKNPIDFLEAKGYKEVKKDLIIKLPKYSLFELENGRKRMLASAG | |
| | ELQKGNELALPSKYVNFLYLASHYEKLKGSPEDNEQKQLFVEQHKHYLDEIIEQISEFSKRVILADAN | |
| | LDKVLSAYNKHRDKPIREQAENIIHLFTLTNLGAPAAFKYFDTTIDRKRYTSTKEVLDATLIHQSITG | |
| | LYETRIDLSQLGGDGGSGGSGGSGGSGGSGGSGGMDKKYSIGLAIGTNSVGWAVITDEYKVPSKKFKV | |
| | LGNTDRHSIKKNLIGALLFDSGETAEATRLKRTARRRYTRRKNRICYLQEIFSNEMAKVDDSFFHRLE | |
| | ESFLVEEDKKHERHPIFGNIVDEVAYHEKYPTIYHLRKKLVDSTDKADLRLIYLALAHMIKFRGHFLI | |
| | EGDLNPDNSDVDKLFIQLVQTYNQLFEENPINASGVDAKAILSARLSKSRRLENLIAQLPGEKKNGLF | |
| | GNLIALSLGLTPNFKSNFDLAEDAKLQLSKDTYDDDLDNLLAQIGDQYADLFLAAKNLSDAILLSDIL | |
| | RVNTEITKAPLSASMIKRYDEHHQDLTLLKALVRQQLPEKYKEIFFDQSKNGYAGYIDGGASQEEFYK | |
| | FIKPILEKMDGTEELLVKLNREDLLRKQRTFDNGSIPHQIHLGELHAILRRQEDFYPFLKDNREKIEK | |
| | ILTFRIPYYVGPLARGNSRFAWMTRKSEETITPWNFEEVVDKGASAQSFIERMTNFDKNLPNEKVLPK | |
| | HSLLYEYFTVYNELTKVKYVTEGMRKPAFLSGEQKKAIVDLLFKTNRKVTVKQLKEDYFKKIECFDSV | |
| | EISGVEDRFNASLGTYHDLLKIIKDKDFLDNEENEDILEDIVLTLTLFEDREMIEERLKTYAHLFDDK | |
| | VMKQLKRRRYTGWGRLSRKLINGIRDKQSGKTILDFLKSDGFANRNFMQLIHDDSLTFKEDIQKAQVS | |
| | GQGDSLHEHIANLAGSPAIKKGILQTVKVVDELVKVMGRHKPENIVIEMARENQTTQKGQKNSRERMK | |
| | RIEEGIKELGSQILKEHPVENTQLQNEKLYLYYLQNGRDMYVDQELDINRLSDYDVDHIVPQSFLKDD | |
| | SIDNKVLTRSDKNRGKSDNVPSEEVVKKMKNYWRQLLNAKLITQRKFDNLTKAERGGLSELDKAGFIK | |
| | RQLVETRQITKHVAQILDSRMNTKYDENDKLIREVKVITLKSKLVSDFRKDFQFYKVREINNYHHAHD | |
| | AYLNAVVGTALIKKYPKLESEFVYGDYKVYDVRKMIAKSEQSGGSKRTADGSEFEPKKKRKV | |
| CP1028-ABE8e- | MKRTADGSEFESPKKKRKVSEVEFSHEYWMRHALTLAKRAWDEREVPVGAVLVHNNRVIGEGWNRPIG | 217 |
| dimer | RHDPTAHAEIMALRQGGLVMQNYRLIDATLYVTLEPCVMCAGAMIHSRIGRVVFGARDAKTGAAGSLM | |
| | DVLHHPGMNHRVEITEGILADECAALLSDFFRMRRQEIKAQKKAQSSTDSGGSSGGSSGSETPGTSES | |
| | ATPESSGGSSGGSSEVEFSHEYWMRHALTLAKRARDEREVPVGAVLVLNNRVIGEGWNRAIGLHDPTA | |
| | HAEIMALRQGGLVMQNYRLIDATLYVTFEPCVMCAGAMIHSRIGRVVFGVRNSKRGAAGSLMNVLNYP | |
| | GMNHRVEITEGILADECAALLCDFYRMPRQVFNAQKKAQSSINSGGSSGGSSGSETPGTSESATPESS | |
| | GGSSGGSEIGKATAKYFFYSNIMNFFKTEITLANGEIRKRPLIETNGETGEIVWDKGRDFATVRKVLS | |
| | MPQVNIVKKTEVQTGGFSKESILPKRNSDKLIARKKDWDPKKYGGFDSPTVAYSVLVVAKVEKGKSKK | |
| | LKSVKELLGITIMERSSFEKNPIDFLEAKGYKEVKKDLIIKLPKYSLFELENGRKRMLASAGELQKGN | |
| | ELALPSKYVNFLYLASHYEKLKGSPEDNEQKQLFVEQHKHYLDEIIEQISEFSKRVILADANLDKVLS | |
| | AYNKHRDKPIREQAENIIHLFTLTNLGAPAAFKYFDTTIDRKRYTSTKEVLDATLIHQSITGLYETRI | |
| | DLSQLGGDGGSGGSGGSGGSGGSGGSGGMDKKYSIGLAIGTNSVGWAVITDEYKVPSKKFKVLGNTDR | |
| | HSIKKNLIGALLFDSGETAEATRLKRTARRRYTRRKNRICYLQEIFSNEMAKVDDSFFHRLEESFLVE | |
| | EDKKHERHPIFGNIVDEVAYHEKYPTIYHLRKKLVDSTDKADLRLIYLALAHMIKFRGHFLIEGDLNP | |
| | DNSDVDKLFIQLVQTYNQLFEENPINASGVDAKAILSARLSKSRRLENLIAQLPGEKKNGLFGNLIAL | |
| | SLGLTPNFKSNFDLAEDAKLQLSKDTYDDDLDNLLAQIGDQYADLFLAAKNLSDAILLSDILRVNTEI | |
| | TKAPLSASMIKRYDEHHQDLTLLKALVRQQLPEKYKEIFFDQSKNGYAGYIDGGASQEEFYKFIKPIL | |
| | EKMDGTEELLVKLNREDLLRKQRTFDNGSIPHQIHLGELHAILRRQEDFYPFLKDNREKIEKILTFRI | |
| | PYYVGPLARGNSRFAWMTRKSEETITPWNFEEVVDKGASAQSFIERMTNFDKNLPNEKVLPKHSLLYE | |
| | YFTVYNELTKVKYVTEGMRKPAFLSGEQKKAIVDLLFKTNRKVTVKQLKEDYFKKIECFDSVEISGVE | |
| | DRFNASLGTYHDLLKIIKDKDFLDNEENEDILEDIVLTLTLFEDREMIEERLKTYAHLFDDKVMKQLK | |
| | RRRYTGWGRLSRKLINGIRDKQSGKTILDFLKSDGFANRNFMQLIHDDSLTFKEDIQKAQVSGQGDSL | |
| | HEHIANLAGSPAIKKGILQTVKVVDELVKVMGRHKPENIVIEMARENQTTQKGQKNSRERMKRIEEGI | |
| | KELGSQILKEHPVENTQLQNEKLYLYYLQNGRDMYVDQELDINRLSDYDVDHIVPQSFLKDDSIDNKV | |
| | LTRSDKNRGKSDNVPSEEVVKKMKNYWRQLLNAKLITQRKFDNLTKAERGGLSELDKAGFIKRQLVET | |
| | RQITKHVAQILDSRMNTKYDENDKLIREVKVITLKSKLVSDFRKDFQFYKVREINNYHHAHDAYLNAV | |
| | VGTALIKKYPKLESEFVYGDYKVYDVRKMIAKSEQSGGSKRTADGSEFEPKKKRKV | |
| CP1041-ABE8e | MKRTADGSEFESPKKKRKVSEVEFSHEYWMRHALTLAKRARDEREVPVGAVLVLNNRVIGEGWNRAIG | 218 |
| | LHDPTAHAEIMALRQGGLVMQNYRLIDATLYVTFEPCVMCAGAMIHSRIGRVVFGVRNSKRGAAGSLM | |
| | NVLNYPGMNHRVEITEGILADECAALLCDFYRMPRQVFNAQKKAQSSINSGGSSGGSSGSETPGTSES | |
| | ATPESSGGSSGGSNIMNFFKTEITLANGEIRKRPLIETNGETGEIVWDKGRDFATVRKVLSMPQVNIV | |
| | KKTEVQTGGFSKESILPKRNSDKLIARKKDWDPKKYGGFDSPTVAYSVLVVAKVEKGKSKKLKSVKEL | |
| | LGITIMERSSFEKNPIDFLEAKGYKEVKKDLIIKLPKYSLFELENGRKRMLASAGELQKGNELALPSK | |
| | YVNFLYLASHYEKLKGSPEDNEQKQLFVEQHKHYLDEIIEQISEFSKRVILADANLDKVLSAYNKHRD | |
| | KPIREQAENIIHLFTLTNLGAPAAFKYFDTTIDRKRYTSTKEVLDATLIHQSITGLYETRIDLSQLGG | |
| | DGGSGGSGGSGGSGGSGGSGGDKKYSIGLAIGTNSVGWAVITDEYKVPSKKFKVLGNTDRHSIKKNLI | |
| | GALLFDSGETAEATRLKRTARRRYTRRKNRICYLQEIFSNEMAKVDDSFFHRLEESFLVEEDKKHERH | |
| | PIFGNIVDEVAYHEKYPTIYHLRKKLVDSTDKADLRLIYLALAHMIKFRGHFLIEGDLNPDNSDVDKL | |
| | FIQLVQTYNQLFEENPINASGVDAKAILSARLSKSRRLENLIAQLPGEKKNGLFGNLIALSLGLTPNF | |
| | KSNFDLAEDAKLQLSKDTYDDDLDNLLAQIGDQYADLFLAAKNLSDAILLSDILRVNTEITKAPLSAS | |
| | MIKRYDEHHQDLTLLKALVRQQLPEKYKEIFFDQSKNGYAGYIDGGASQEEFYKFIKPILEKMDGTEE | |
| | LLVKLNREDLLRKQRTFDNGSIPHQIHLGELHAILRRQEDFYPFLKDNREKIEKILTFRIPYYVGPLA | |
| | RGNSRFAWMTRKSEETITPWNFEEVVDKGASAQSFIERMTNFDKNLPNEKVLPKHSLLYEYFTVYNEL | |
| | TKVKYVTEGMRKPAFLSGEQKKAIVDLLFKTNRKVTVKQLKEDYFKKIECFDSVEISGVEDRFNASLG | |
| | TYHDLLKIIKDKDFLDNEENEDILEDIVLTLTLFEDREMIEERLKTYAHLFDDKVMKQLKRRRYTGWG | |
| | RLSRKLINGIRDKQSGKTILDFLKSDGFANRNFMQLIHDDSLTFKEDIQKAQVSGQGDSLHEHIANLA | |
| | GSPAIKKGILQTVKVVDELVKVMGRHKPENIVIEMARENQTTQKGQKNSRERMKRIEEGIKELGSQIL | |
| | KEHPVENTQLQNEKLYLYYLQNGRDMYVDQELDINRLSDYDVDHIVPQSFLKDDSIDNKVLTRSDKNR | |
| | GKSDNVPSEEVVKKMKNYWRQLLNAKLITQRKFDNLTKAERGGLSELDKAGFIKRQLVETRQITKHVA | |
| | QILDSRMNTKYDENDKLIREVKVITLKSKLVSDFRKDFQFYKVREINNYHHAHDAYLNAVVGTALIKK | |
| | YPKLESEFVYGDYKVYDVRKMIAKSEQEIGKATAKYFFYSSGGSKRTADGSEFEPKKKRKV | |
| ABE8e (TadA-8e | MKRTADGSEFESPKKKRKVSEVEFSHEYWMRHALTLAKRARDEREVPVGAVLVLNNRVIGEGWNRAIG | 219 |
| V82G) | LHDPTAHAEIMALRQGGLVMQNYRLIDATLYVTFEPCVMCAGAMIHSRIGRVVFGVRNSKRGAAGSLM | |
| | NVLNYPGMNHRVEITEGILADECAALLCDFYRMPRQVFNAQKKAQSSINSGGSSGGSSGSETPGTSES | |
| | ATPESSGGSSGGSDKKYSIGLAIGTNSVGWAVITDEYKVPSKKFKVLGNTDRHSIKKNLIGALLFDSG | |
| | ETAEATRLKRTARRRYTRRKNRICYLQEIFSNEMAKVDDSFFHRLEESFLVEEDKKHERHPIFGNIVD | |
| | EVAYHEKYPTIYHLRKKLVDSTDKADLRLIYLALAHMIKFRGHFLIEGDLNPDNSDVDKLFIQLVQTY | |
| | NQLFEENPINASGVDAKAILSARLSKSRRLENLIAQLPGEKKNGLFGNLIALSLGLTPNFKSNFDLAE | |
| | DAKLQLSKDTYDDDLDNLLAQIGDQYADLFLAAKNLSDAILLSDILRVNTEITKAPLSASMIKRYDEH | |
| | HQDLTLLKALVRQQLPEKYKEIFFDQSKNGYAGYIDGGASQEEFYKFIKPILEKMDGTEELLVKLNRE | |
| | DLLRKQRTFDNGSIPHQIHLGELHAILRRQEDFYPFLKDNREKIEKILTFRIPYYVGPLARGNSRFAW | |
| | MTRKSEETITPWNFEEVVDKGASAQSFIERMTNFDKNLPNEKVLPKHSLLYEYFTVYNELTKVKYVTE | |
| | GMRKPAFLSGEQKKAIVDLLFKTNRKVTVKQLKEDYFKKIECFDSVEISGVEDRFNASLGTYHDLLKI | |
| | IKDKDFLDNEENEDILEDIVLTLTLFEDREMIEERLKTYAHLFDDKVMKQLKRRRYTGWGRLSRKLIN | |
| | GIRDKQSGKTILDFLKSDGFANRNFMQLIHDDSLTFKEDIQKAQVSGQGDSLHEHIANLAGSPAIKKG | |
| | ILQTVKVVDELVKVMGRHKPENIVIEMARENQTTQKGQKNSRERMKRIEEGIKELGSQILKEHPVENT | |
| | QLQNEKLYLYYLQNGRDMYVDQELDINRLSDYDVDHIVPQSFLKDDSIDNKVLTRSDKNRGKSDNVPS | |
| | EEVVKKMKNYWRQLLNAKLITQRKFDNLTKAERGGLSELDKAGFIKRQLVETRQITKHVAQILDSRMN | |
| | TKYDENDKLIREVKVITLKSKLVSDFRKDFQFYKVREINNYHHAHDAYLNAVVGTALIKKYPKLESEF | |
| | VYGDYKVYDVRKMIAKSEQEIGKATAKYFFYSNIMNFFKTEITLANGEIRKRPLIETNGETGEIVWDK | |
| | GRDFATVRKVLSMPQVNIVKKTEVQTGGFSKESILPKRNSDKLIARKKDWDPKKYGGFDSPTVAYSVL | |
| | VVAKVEKGKSKKLKSVKELLGITIMERSSFEKNPIDFLEAKGYKEVKKDLIIKLPKYSLFELENGRKR | |
| | MLASAGELQKGNELALPSKYVNFLYLASHYEKLKGSPEDNEQKQLFVEQHKHYLDEIIEQISEFSKRV | |
| | ILADANLDKVLSAYNKHRDKPIREQAENIIHLFTLTNLGAPAAFKYFDTTIDRKRYTSTKEVLDATLI | |
| | HQSITGLYETRIDLSQLGGDSGGSKRTADGSEFEPKKKRKV | |
| ABE8e (TadA-8e | MKRTADGSEFESPKKKRKVSEVEFSHEYWMRHALTLAKRARDEREVPVGAVLVLNNRVIGEGWNRAIG | 220 |
| K2 0AR2 1A) | LHDPTAHAEIMALRQGGLVMQNYRLIDATLYVTFEPCVMCAGAMIHSRIGRVVFGVRNSKRGAAGSLM | |
| | NVLNYPGMNHRVEITEGILADECAALLCDFYRMPRQVFNAQKKAQSSINSGGSSGGSSGSETPGTSES | |
| | ATPESSGGSSGGSDKKYSIGLAIGTNSVGWAVITDEYKVPSKKFKVLGNTDRHSIKKNLIGALLFDSG | |
| | ETAEATRLKRTARRRYTRRKNRICYLQEIFSNEMAKVDDSFFHRLEESFLVEEDKKHERHPIFGNIVD | |
| | EVAYHEKYPTIYHLRKKLVDSTDKADLRLIYLALAHMIKFRGHFLIEGDLNPDNSDVDKLFIQLVQTY | |
| | NQLFEENPINASGVDAKAILSARLSKSRRLENLIAQLPGEKKNGLFGNLIALSLGLTPNFKSNFDLAE | |
| | DAKLQLSKDTYDDDLDNLLAQIGDQYADLFLAAKNLSDAILLSDILRVNTEITKAPLSASMIKRYDEH | |
| | HQDLTLLKALVRQQLPEKYKEIFFDQSKNGYAGYIDGGASQEEFYKFIKPILEKMDGTEELLVKLNRE | |
| | DLLRKQRTFDNGSIPHQIHLGELHAILRRQEDFYPFLKDNREKIEKILTFRIPYYVGPLARGNSRFAW | |
| | MTRKSEETITPWNFEEVVDKGASAQSFIERMTNFDKNLPNEKVLPKHSLLYEYFTVYNELTKVKYVTE | |
| | GMRKPAFLSGEQKKAIVDLLFKTNRKVTVKQLKEDYFKKIECFDSVEISGVEDRFNASLGTYHDLLKI | |
| | IKDKDFLDNEENEDILEDIVLTLTLFEDREMIEERLKTYAHLFDDKVMKQLKRRRYTGWGRLSRKLIN | |
| | GIRDKQSGKTILDFLKSDGFANRNFMQLIHDDSLTFKEDIQKAQVSGQGDSLHEHIANLAGSPAIKKG | |
| | ILQTVKVVDELVKVMGRHKPENIVIEMARENQTTQKGQKNSRERMKRIEEGIKELGSQILKEHPVENT | |
| | QLQNEKLYLYYLQNGRDMYVDQELDINRLSDYDVDHIVPQSFLKDDSIDNKVLTRSDKNRGKSDNVPS | |
| | EEVVKKMKNYWRQLLNAKLITQRKFDNLTKAERGGLSELDKAGFIKRQLVETRQITKHVAQILDSRMN | |
| | TKYDENDKLIREVKVITLKSKLVSDFRKDFQFYKVREINNYHHAHDAYLNAVVGTALIKKYPKLESEF | |
| | VYGDYKVYDVRKMIAKSEQEIGKATAKYFFYSNIMNFFKTEITLANGEIRKRPLIETNGETGEIVWDK | |
| | GRDFATVRKVLSMPQVNIVKKTEVQTGGFSKESILPKRNSDKLIARKKDWDPKKYGGFDSPTVAYSVL | |
| | VVAKVEKGKSKKLKSVKELLGITIMERSSFEKNPIDFLEAKGYKEVKKDLIIKLPKYSLFELENGRKR | |
| | MLASAGELQKGNELALPSKYVNFLYLASHYEKLKGSPEDNEQKQLFVEQHKHYLDEIIEQISEFSKRV | |
| | ILADANLDKVLSAYNKHRDKPIREQAENIIHLFTLTNLGAPAAFKYFDTTIDRKRYTSTKEVLDATLI | |
| | HQSITGLYETRIDLSQLGGDSGGSKRTADGSEFEPKKKRKV | |
| ABE8-SpCas9 | MKRTADGSEFESPKKKRKVSEVEFSHEYWMRHALTLAKRAWDEREVPVGAVLVHNNRVIGEGWNRPIG | 221 |
| editor (AA) | RHDPTAHAEIMALRQGGLVMQNYRLIDATLYVTLEPCVMCAGAMIHSRIGRVVFGARDAKTGAAGSLM | |
| NLS, wtTadA, | DVLHHPGMNHRVEITEGILADECAALLSDFFRMRRQEIKAQKKAQSSTDSGGSSGGSSGSETPGTSES | |
| linker, TadA*, | ATPESSGGSSGGSGTTGATGGAGCTCTGGGCCTTCTTCTGAGCATTGAACACCTGTCTAGGCATCCGA | |
| Cas 9 | TAGAAATCGCACAGCAGGGCGGCACATTCATCTGCCAGGATTCCCTCGGTAATTTCGACGCGGTGATT | |
| | CATGCCGGGGTAGTTCAGCACGTTCATCAGGGAGCCTGCGGCGCCTCTTTTTGAGTTCCTCACGCCAA | |
| | ACACCACGCGGCCGATCCTAGAGTGGATCATGGCGCCGGCGCACATCACGCAAGGCTCGAATGTCACG | |
| | TACAGGGTGGCGTCAATCAGTCTGTAGTTCTGCATGACCAGGCCGCCCTGTCTCAGGGCCATAATTTC | |
| | GGCATGGGCTGTTGGGTCGTGCAGGCCGATGGCTCTGTTCCAGCCCTCGCCGATCACTCTATTGTTCA | |
| | GCACCAGCACGGCTCCCACAGGCACCTCCCTCTCATCCCGTGCCCTCTTGGCCAGGGTCAGGGCATGT | |
| | CTCATCCAGTACTCGTGGGAAAACTCCACCTCAGASGGSSGGSSGSETPGTSESATPESSGGSSGGSD | |
| | KKYSIGLAIGTNSVGWAVITDEYKVPSKKFKVLGNTDRHSIKKNLIGALLFDSGETAEATRLKRTARR | |
| | RYTRRKNRICYLQEIFSNEMAKVDDSFFHRLEESFLVEEDKKHERHPIFGNIVDEVAYHEKYPTIYHL | |
| | RKKLVDSTDKADLRLIYLALAHMIKFRGHFLIEGDLNPDNSDVDKLFIQLVQTYNQLFEENPINASGV | |
| | DAKAILSARLSKSRRLENLIAQLPGEKKNGLFGNLIALSLGLTPNFKSNFDLAEDAKLQLSKDTYDDD | |
| | LDNLLAQIGDQYADLFLAAKNLSDAILLSDILRVNTEITKAPLSASMIKRYDEHHQDLTLLKALVRQQ | |
| | LPEKYKEIFFDQSKNGYAGYIDGGASQEEFYKFIKPILEKMDGTEELLVKLNREDLLRKQRTFDNGSI | |
| | PHQIHLGELHAILRRQEDFYPFLKDNREKIEKILTFRIPYYVGPLARGNSRFAWMTRKSEETITPWNF | |
| | EEVVDKGASAQSFIERMTNFDKNLPNEKVLPKHSLLYEYFTVYNELTKVKYVTEGMRKPAFLSGEQKK | |
| | AIVDLLFKTNRKVTVKQLKEDYFKKIECFDSVEISGVEDRFNASLGTYHDLLKIIKDKDFLDNEENED | |
| | ILEDIVLTLTLFEDREMIEERLKTYAHLFDDKVMKQLKRRRYTGWGRLSRKLINGIRDKQSGKTILDF | |
| | LKSDGFANRNFMQLIHDDSLTFKEDIQKAQVSGQGDSLHEHIANLAGSPAIKKGILQTVKVVDELVKV | |
| | MGRHKPENIVIEMARENQTTQKGQKNSRERMKRIEEGIKELGSQILKEHPVENTQLQNEKLYLYYLQN | |
| | GRDMYVDQELDINRLSDYDVDHIVPQSFLKDDSIDNKVLTRSDKNRGKSDNVPSEEVVKKMKNYWRQL | |
| | LNAKLITQRKFDNLTKAERGGLSELDKAGFIKRQLVETRQITKHVAQILDSRMNTKYDENDKLIREVK | |
| | VITLKSKLVSDFRKDFQFYKVREINNYHHAHDAYLNAVVGTALIKKYPKLESEFVYGDYKVYDVRKMI | |
| | AKSEQEIGKATAKYFFYSNIMNFFKTEITLANGEIRKRPLIETNGETGEIVWDKGRDFATVRKVLSMP | |
| | QVNIVKKTEVQTGGFSKESILPKRNSDKLIARKKDWDPKKYGGFDSPTVAYSVLVVAKVEKGKSKKLK | |
| | SVKELLGITIMERSSFEKNPIDFLEAKGYKEVKKDLIIKLPKYSLFELENGRKRMLASAGELQKGNEL | |
| | ALPSKYVNFLYLASHYEKLKGSPEDNEQKQLFVEQHKHYLDEIIEQISEFSKRVILADANLDKVLSAY | |
| | NKHRDKPIREQAENIIHLFTLTNLGAPAAFKYFDTTIDRKRYTSTKEVLDATLIHQSITGLYETRIDL | |
| | SQLGGDSGGSKRTADGSEFEPKKKRKV | |
| ABE8-SpCas9 | ATGAAACGGACAGCCGACGGAAGCGAGTTCGAGTCACCAAAGAAGAAGCGGAAAGTCTCTGAAGTCGA | 222 |
| editor (NT) | GTTTAGCCACGAGTATTGGATGAGGCACGCACTGACCCTGGCAAAGCGAGCATGGGATGAAAGAGAAG | |
| NLS, WtTadA, | TCCCCGTGGGCGCCGTGCTGGTGCACAACAATAGAGTGATCGGAGAGGGATGGAACAGGCCAATCGGC | |
| linker, TadA*, | CGCCACGACCCTACCGCACACGCAGAGATCATGGCACTGAGGCAGGGAGGCCTGGTCATGCAGAATTA | |
| Cas 9 | CCGCCTGATCGATGCCACCCTGTATGTGACACTGGAGCCATGCGTGATGTGCGCAGGAGCAATGATCC | |
| | ACAGCAGGATCGGAAGAGTGGTGTTCGGAGCACGGGACGCCAAGACCGGCGCAGCAGGCTCCCTGATG | |
| | GATGTGCTGCACCACCCCGGCATGAACCACCGGGTGGAGATCACAGAGGGAATCCTGGCAGACGAGTG | |
| | CGCCGCCCTGCTGAGCGATTTCTTTAGAATGCGGAGACAGGAGATCAAGGCCCAGAAGAAGGCACAGA | |
| | GCTCCACCGACTCTGGAGGATCTAGCGGAGGATCCTCTGGAAGCGAGACACCAGGCACAAGCGAGTCC | |
| | GCCACACCAGAGAGCTCCGGCGGCTCCTCCGGAGGATCCTCTGAGGTGGAGTTTTCCCACGAGTACTG | |
| | GATGAGACATGCCCTGACCCTGGCCAAGAGGGCACGGGATGAGAGGGAGGTGCCTGTGGGAGCCGTGC | |
| | TGGTGCTGAACAATAGAGTGATCGGCGAGGGCTGGAACAGAGCCATCGGCCTGCACGACCCAACAGCC | |
| | CATGCCGAAATTATGGCCCTGAGACAGGGCGGCCTGGTCATGCAGAACTACAGACTGATTGACGCCAC | |
| | CCTGTACGTGACATTCGAGCCTTGCGTGATGTGCGCCGGCGCCATGATCCACTCTAGGATCGGCCGCG | |
| | TGGTGTTTGGCGTGAGGAACTCAAAAAGAGGCGCCGCAGGCTCCCTGATGAACGTGCTGAACTACCCC | |
| | GGCATGAATCACCGCGTCGAAATTACCGAGGGAATCCTGGCAGATGAATGTGCCGCCCTGCTGTGCGA | |
| | TTTCTATCGGATGCCTAGACAGGTGTTCAATGCTCAGAAGAAGGCCCAGAGCTCCATCAACAGTGGTG | |
| | GAAGTAGCGGAGGCTCCTCTGGCTCTGAGACACCTGGCACAAGCGAGAGCGCAACACCTGAAAGCAGC | |
| | GGGGGCAGCAGCGGGGGGTCAGACAAGAAGTACAGCATCGGCCTGGCCATCGGCACCAACTCTGTGGG | |
| | CTGGGCCGTGATCACCGACGAGTACAAGGTGCCCAGCAAGAAATTCAAGGTGCTGGGCAACACCGACC | |
| | GGCACAGCATCAAGAAGAACCTGATCGGAGCCCTGCTGTTCGACAGCGGCGAAACAGCCGAGGCCACC | |
| | CGGCTGAAGAGAACCGCCAGAAGAAGATACACCAGACGGAAGAACCGGATCTGCTATCTGCAAGAGAT | |
| | CTTCAGCAACGAGATGGCCAAGGTGGACGACAGCTTCTTCCACAGACTGGAAGAGTCCTTCCTGGTGG | |
| | AAGAGGATAAGAAGCACGAGCGGCACCCCATCTTCGGCAACATCGTGGACGAGGTGGCCTACCACGAG | |
| | AAGTACCCCACCATCTACCACCTGAGAAAGAAACTGGTGGACAGCACCGACAAGGCCGACCTGCGGCT | |
| | GATCTATCTGGCCCTGGCCCACATGATCAAGTTCCGGGGCCACTTCCTGATCGAGGGCGACCTGAACC | |
| | CCGACAACAGCGACGTGGACAAGCTGTTCATCCAGCTGGTGCAGACCTACAACCAGCTGTTCGAGGAA | |
| | AACCCCATCAACGCCAGCGGCGTGGACGCCAAGGCCATCCTGTCTGCCAGACTGAGCAAGAGCAGACG | |
| | GCTGGAAAATCTGATCGCCCAGCTGCCCGGCGAGAAGAAGAATGGCCTGTTCGGAAACCTGATTGCCC | |
| | TGAGCCTGGGCCTGACCCCCAACTTCAAGAGCAACTTCGACCTGGCCGAGGATGCCAAACTGCAGCTG | |
| | AGCAAGGACACCTACGACGACGACCTGGACAACCTGCTGGCCCAGATCGGCGACCAGTACGCCGACCT | |
| | GTTTCTGGCCGCCAAGAACCTGTCCGACGCCATCCTGCTGAGCGACATCCTGAGAGTGAACACCGAGA | |
| | TCACCAAGGCCCCCCTGAGCGCCTCTATGATCAAGAGATACGACGAGCACCACCAGGACCTGACCCTG | |
| | CTGAAAGCTCTCGTGCGGCAGCAGCTGCCTGAGAAGTACAAAGAGATTTTCTTCGACCAGAGCAAGAA | |
| | CGGCTACGCCGGCTACATTGACGGCGGAGCCAGCCAGGAAGAGTTCTACAAGTTCATCAAGCCCATCC | |
| | TGGAAAAGATGGACGGCACCGAGGAACTGCTCGTGAAGCTGAACAGAGAGGACCTGCTGCGGAAGCAG | |
| | CGGACCTTCGACAACGGCAGCATCCCCCACCAGATCCACCTGGGAGAGCTGCACGCCATTCTGCGGCG | |
| | GCAGGAAGATTTTTACCCATTCCTGAAGGACAACCGGGAAAAGATCGAGAAGATCCTGACCTTCCGCA | |
| | TCCCCTACTACGTGGGCCCTCTGGCCAGGGGAAACAGCAGATTCGCCTGGATGACCAGAAAGAGCGAG | |
| | GAAACCATCACCCCCTGGAACTTCGAGGAAGTGGTGGACAAGGGCGCTTCCGCCCAGAGCTTCATCGA | |
| | GCGGATGACCAACTTCGATAAGAACCTGCCCAACGAGAAGGTGCTGCCCAAGCACAGCCTGCTGTACG | |
| | AGTACTTCACCGTGTATAACGAGCTGACCAAAGTGAAATACGTGACCGAGGGAATGAGAAAGCCCGCC | |
| | TTCCTGAGCGGCGAGCAGAAAAAGGCCATCGTGGACCTGCTGTTCAAGACCAACCGGAAAGTGACCGT | |
| | GAAGCAGCTGAAAGAGGACTACTTCAAGAAAATCGAGGACAAGAAGTACAGCATCGGCCTGGCCATCG | |
| | GCACCAACTCTGTGGGCTGGGCCGTGATCACCGACGAGTACAAGGTGCCCAGCAAGAAATTCAAGGTG | |
| | CTGGGCAACACCGACCGGCACAGCATCAAGAAGAACCTGATCGGAGCCCTGCTGTTCGACAGCGGCGA | |
| | AACAGCCGAGGCCACCCGGCTGAAGAGAACCGCCAGAAGAAGATACACCAGACGGAAGAACCGGATCT | |
| | GCTATCTGCAAGAGATCTTCAGCAACGAGATGGCCAAGGTGGACGACAGCTTCTTCCACAGACTGGAA | |
| | GAGTCCTTCCTGGTGGAAGAGGATAAGAAGCACGAGCGGCACCCCATCTTCGGCAACATCGTGGACGA | |
| | GGTGGCCTACCACGAGAAGTACCCCACCATCTACCACCTGAGAAAGAAACTGGTGGACAGCACCGACA | |
| | AGGCCGACCTGCGGCTGATCTATCTGGCCCTGGCCCACATGATCAAGTTCCGGGGCCACTTCCTGATC | |
| | GAGGGCGACCTGAACCCCGACAACAGCGACGTGGACAAGCTGTTCATCCAGCTGGTGCAGACCTACAA | |
| | CCAGCTGTTCGAGGAAAACCCCATCAACGCCAGCGGCGTGGACGCCAAGGCCATCCTGTCTGCCAGAC | |
| | TGAGCAAGAGCAGACGGCTGGAAAATCTGATCGCCCAGCTGCCCGGCGAGAAGAAGAATGGCCTGTTC | |
| | GGAAACCTGATTGCCCTGAGCCTGGGCCTGACCCCCAACTTCAAGAGCAACTTCGACCTGGCCGAGGA | |
| | TGCCAAACTGCAGCTGAGCAAGGACACCTACGACGACGACCTGGACAACCTGCTGGCCCAGATCGGCG | |
| | ACCAGTACGCCGACCTGTTTCTGGCCGCCAAGAACCTGTCCGACGCCATCCTGCTGAGCGACATCCTG | |
| | AGAGTGAACACCGAGATCACCAAGGCCCCCCTGAGCGCCTCTATGATCAAGAGATACGACGAGCACCA | |
| | CCAGGACCTGACCCTGCTGAAAGCTCTCGTGCGGCAGCAGCTGCCTGAGAAGTACAAAGAGATTTTCT | |
| | TCGACCAGAGCAAGAACGGCTACGCCGGCTACATTGACGGCGGAGCCAGCCAGGAAGAGTTCTACAAG | |
| | TTCATCAAGCCCATCCTGGAAAAGATGGACGGCACCGAGGAACTGCTCGTGAAGCTGAACAGAGAGGA | |
| | CCTGCTGCGGAAGCAGCGGACCTTCGACAACGGCAGCATCCCCCACCAGATCCACCTGGGAGAGCTGC | |
| | ACGCCATTCTGCGGCGGCAGGAAGATTTTTACCCATTCCTGAAGGACAACCGGGAAAAGATCGAGAAG | |
| | ATCCTGACCTTCCGCATCCCCTACTACGTGGGCCCTCTGGCCAGGGGAAACAGCAGATTCGCCTGGAT | |
| | GACCAGAAAGAGCGAGGAAACCATCACCCCCTGGAACTTCGAGGAAGTGGTGGACAAGGGCGCTTCCG | |
| | CCCAGAGCTTCATCGAGCGGATGACCAACTTCGATAAGAACCTGCCCAACGAGAAGGTGCTGCCCAAG | |
| | CACAGCCTGCTGTACGAGTACTTCACCGTGTATAACGAGCTGACCAAAGTGAAATACGTGACCGAGGG | |
| | AATGAGAAAGCCCGCCTTCCTGAGCGGCGAGCAGAAAAAGGCCATCGTGGACCTGCTGTTCAAGACCA | |
| | ACCGGAAAGTGACCGTGAAGCAGCTGAAAGAGGACTACTTCAAGAAAATCGAGTCTGGCGGCTCAAAA | |
| | AGAACCGCCGACGGCAGCGAATTCGAGCCCAAGAAGAAGAGGAAAGTC | |
| ABE8-NRTH | NLS, wtTadA, linker, TadA*, NRCH | 463 |
| editor | Amino Acid Sequence | |
| | MKRTADGSEFESPKKKRKVSEVEFSHEYWMRHALTLAKRAWDEREVPVGAVLVHNNRVIGEGWNRPIG | |
| | RHDPTAHAEIMALRQGGLVMQNYRLIDATLYVTLEPCVMCAGAMIHSRIGRVVFGARDAKTGAAGSLM | |
| | DVLHHPGMNHRVEITEGILADECAALLSDFFRMRRQEIKAQKKAQSSTDSGGSSGGSSGSETPGTSES | |
| | ATPESSGGSSGGSGTTGATGGAGCTCTGGGCCTTCTTCTGAGCATTGAACACCTGTCTAGGCATCCGA | |
| | TAGAAATCGCACAGCAGGGCGGCACATTCATCTGCCAGGATTCCCTCGGTAATTTCGACGCGGTGATT | |
| | CATGCCGGGGTAGTTCAGCACGTTCATCAGGGAGCCTGCGGCGCCTCTTTTTGAGTTCCTCACGCCAA | |
| | ACACCACGCGGCCGATCCTAGAGTGGATCATGGCGCCGGCGCACATCACGCAAGGCTCGAATGTCACG | |
| | TACAGGGTGGCGTCAATCAGTCTGTAGTTCTGCATGACCAGGCCGCCCTGTCTCAGGGCCATAATTTC | |
| | GGCATGGGCTGTTGGGTCGTGCAGGCCGATGGCTCTGTTCCAGCCCTCGCCGATCACTCTATTGTTCA | |
| | GCACCAGCACGGCTCCCACAGGCACCTCCCTCTCATCCCGTGCCCTCTTGGCCAGGGTCAGGGCATGT | |
| | CTCATCCAGTACTCGTGGGAAAACTCCACCTCAGASGGSSGGSSGSETPGTSESATPESSGGSSGGSD | |
| | KKYSIGLAIGTNSVGWAVITDEYKVPSKKFKVLGNTDRHSIKKNLIGALLFDSGETAEATRLKRTARR | |
| | RYTRRKNRICYLQEIFSNEMAKVDDSFFHRLEESFLVEEDKKHERHPIFGNIVDEVAYHEKYPTIYHL | |
| | RKKLVDSTDKADLRLIYLALAHMIKFRGHFLIEGDLNPDNSDVDKLFIQLVQTYNQLFEENPINASGV | |
| | DAKAILSARLSKSRRLENLIAQLPGEKKNGLFGNLIALSLGLTPNFKSNFDLAEDAKLQLSKDTYDDD | |
| | LDNLLAQIGDQYADLFLAAKNLSDAILLSDILRVNTEITKAPLSASMVKRYDEHHQDLTLLKALVRQQ | |
| | LPEKYKEIFFDQSKNGYAGYIDGGASQEEFYKFIKPILEKMDGTEELLVKLNREDLLRKQRTFDNGII | |
| | PHQIHLGELHAILRRQGDFYPFLKDNREKIEKILTFRIPYYVGPLARGNSRFAWMTRKSEETITPWNF | |
| | EEVVDKGASAQSFIERMTNFDKNLPNEKVLPKHSLLYEYFTVYNELTKVKYVTEGMRKPAFLSGEQKK | |
| | AIVDLLFKTNRKVTVKQLKEDYFKKIECFDSVEISGVEDRFNASLGTYHDLLKIIKDKDFLDNEENED | |
| | ILEDIVLTLTLFEDREMIEERLKTYAHLFDDKVMKQLKRLRYTGWGRLSRKLINGIRDKQSGKTILDF | |
| | LKSDGFANRNFMQLIHDDSLTFKEDIQKAQVSCQGDSLHEHIANLAGSPAIKKGILQTVKVVDELIKV | |
| | MGGHKPENIVIEMARENQTTQKGQKNSRERMKRIEEGIKELGSQILKEHPVENTQLQNEKLYLYYLQN | |
| | GRDMYVDQELDINRLSDYDVDHIVPQSFLKDDSIENKVLTRSDKNRGKSDNVPSEEVVKKMKNYWRQL | |
| | LNAKLITQRKFDNLTKAERGGLSELDKAGFIKRQLAETRQITKHVAQILDSRMNTKYDENDKLIREVK | |
| | VITLKSKLVSDFRKDFQFYKVREINNYHHAHDAYLNAVVGTALIKKYPKLESEFVYGDYKVYDVRKMI | |
| | AKSEQEIGKATAKYFFYSNIMNFFKTEITLANGEIRKRPLIETNGETGEIVWDKGRDFATVRKVLSMP | |
| | QVNIVKKTEVQTGGFSKESILPKGNSDKLIARKKDWDPKKYGGFNSPTVAYSVLVVAKVEKGKSKKLK | |
| | SVKELLGITIMERSSFEKNPIGFLEAKGYKEVKKDLIIKLPKYSLFELENGRKRMLASASVLHKGNEL | |
| | ALPSKYVNFLYLASHYEKLKGSSEDNKQKQLFVEQHKHYLDEIIEQISEFSKRVILADANLDKVLSAY | |
| | NKHRDKPIREQAENIIHLFTLTNLGASAAFKYFDTTIGRKLYTSTKEVLDATLIHQSITGLYETRIDL | |
| | SQLGGDSGGSKRTADGSEFEPKKKRKV | |
| ABE-SpyMac | NLS, wtTadA, linker, TadA*, NRCH | 464 |
| editor | Amino Acid Sequence | |
| | MKRTADGSEFESPKKKRKVSEVEFSHEYWMRHALTLAKRAWDEREVPVGAVLVHNNRVIGEGWNRPIG | |
| | RHDPTAHAEIMALRQGGLVMQNYRLIDATLYVTLEPCVMCAGAMIHSRIGRVVFGARDAKTGAAGSLM | |
| | DVLHHPGMNHRVEITEGILADECAALLSDFFRMRRQEIKAQKKAQSSTDSGGSSGGSSGSETPGTSES | |
| | ATPESSGGSSGGSGTTGATGGAGCTCTGGGCCTTCTTCTGAGCATTGAACACCTGTCTAGGCATCCGA | |
| | TAGAAATCGCACAGCAGGGCGGCACATTCATCTGCCAGGATTCCCTCGGTAATTTCGACGCGGTGATT | |
| | CATGCCGGGGTAGTTCAGCACGTTCATCAGGGAGCCTGCGGCGCCTCTTTTTGAGTTCCTCACGCCAA | |
| | ACACCACGCGGCCGATCCTAGAGTGGATCATGGCGCCGGCGCACATCACGCAAGGCTCGAATGTCACG | |
| | TACAGGGTGGCGTCAATCAGTCTGTAGTTCTGCATGACCAGGCCGCCCTGTCTCAGGGCCATAATTTC | |
| | GGCATGGGCTGTTGGGTCGTGCAGGCCGATGGCTCTGTTCCAGCCCTCGCCGATCACTCTATTGTTCA | |
| | GCACCAGCACGGCTCCCACAGGCACCTCCCTCTCATCCCGTGCCCTCTTGGCCAGGGTCAGGGCATGT | |
| | CTCATCCAGTACTCGTGGGAAAACTCCACCTCAGASGGSSGGSSGSETPGTSESATPESSGGSSGGSD | |
| | KKYSIGLAIGTNSVGWAVITDEYKVPSKKFKVLGNTDRHSIKKNLIGALLFDSGETAEATRLKRTARR | |
| | RYTRRKNRICYLQEIFSNEMAKVDDSFFHRLEESFLVEEDKKHERHPIFGNIVDEVAYHEKYPTIYHL | |
| | RKKLVDSTDKADLRLIYLALAHMIKFRGHFLIEGDLNPDNSDVDKLFIQLVQTYNQLFEENPINASGV | |
| | DAKAILSARLSKSRRLENLIAQLPGEKKNGLFGNLIALSLGLTPNFKSNFDLAEDAKLQLSKDTYDDD | |
| | LDNLLAQIGDQYADLFLAAKNLSDAILLSDILRVNTEITKAPLSASMIKRYDEHHQDLTLLKALVRQQ | |
| | LPEKYKEIFFDQSKNGYAGYIDGGASQEEFYKFIKPILEKMDGTEELLVKLNREDLLRKQRTFDNGSI | |
| | PHQIHLGELHAILRRQEDFYPFLKDNREKIEKILTFRIPYYVGPLARGNSRFAWMTRKSEETITPWNF | |
| | EEVVDKGASAQSFIERMTNFDKNLPNEKVLPKHSLLYEYFTVYNELTKVKYVTEGMRKPAFLSGEQKK | |
| | AIVDLLFKTNRKVTVKQLKEDYFKKIECFDSVEISGVEDRFNASLGTYHDLLKIIKDKDFLDNEENED | |
| | ILEDIVLTLTLFEDREMIEERLKTYAHLFDDKVMKQLKRRRYTGWGRLSRKLINGIRDKQSGKTILDF | |
| | LKSDGFANRNFMQLIHDDSLTFKEDIQKAQVSGQGDSLHEHIANLAGSPAIKKGILQTVKVVDELVKV | |
| | MGRHKPENIVIEMARENQTTQKGQKNSRERMKRIEEGIKELGSQILKEHPVENTQLQNEKLYLYYLQN | |
| | GRDMYVDQELDINRLSDYDVDHIVPQSFLKDDSIDNKVLTRSDKNRGKSDNVPSEEVVKKMKNYWRQL | |
| | LNAKLITQRKFDNLTKAERGGLSELDKAGFIKRQLVETRQITKHVAQILDSRMNTKYDENDKLIREVK | |
| | VITLKSKLVSDFRKDFQFYKVREINNYHHAHDAYLNAVVGTALIKKYPKLESEFVYGDYKVYDVRKMI | |
| | AKSEQEIGKATAKYFFYSNIMNFFKTEITLANGEIRKRPLIETNGETGEIVWDKGRDFATVRKVLSMP | |
| | QVNIVKKTEIQTVGQNGGLFDDNPKSPLEVTPSKLVPLKKELNPKKYGGYQKPTTAYPVLLITDTKQL | |
| | IPISVMNKKQFEQNPVKFLRDRGYQQVGKNDFIKLPKYTLVDIGDGIKRLWASSKEIHKGNQLVVSKK | |
| | SQILLYHAHHLDSDLSNDYLQNHNQQFDVLFNEIISFSKKCKLGKEHIQKIENVYSNKKNSASIEELA | |
| | ESFIKLLGFTQLGATSPFNFLGVKLNQKQYKGKKDYILPCTEGTLIRQSITGLYETRVDLSKIGEDSG | |
| | GSKRTADGSEFEPKKKRKV | |
| ABE8-VRQR- | NLS, wtTadA, linker, TadA*, NRCH | 465 |
| CP1041 editor | Amino Acid Sequence | |
| | MKRTADGSEFESPKKKRKVSEVEFSHEYWMRHALTLAKRAWDEREVPVGAVLVHNNRVIGEGWNRPIG | |
| | RHDPTAHAEIMALRQGGLVMQNYRLIDATLYVTLEPCVMCAGAMIHSRIGRVVFGARDAKTGAAGSLM | |
| | DVLHHPGMNHRVEITEGILADECAALLSDFFRMRRQEIKAQKKAQSSTDSGGSSGGSSGSETPGTSES | |
| | ATPESSGGSSGGSGTTGATGGAGCTCTGGGCCTTCTTCTGAGCATTGAACACCTGTCTAGGCATCCGA | |
| | TAGAAATCGCACAGCAGGGCGGCACATTCATCTGCCAGGATTCCCTCGGTAATTTCGACGCGGTGATT | |
| | CATGCCGGGGTAGTTCAGCACGTTCATCAGGGAGCCTGCGGCGCCTCTTTTTGAGTTCCTCACGCCAA | |
| | ACACCACGCGGCCGATCCTAGAGTGGATCATGGCGCCGGCGCACATCACGCAAGGCTCGAATGTCACG | |
| | TACAGGGTGGCGTCAATCAGTCTGTAGTTCTGCATGACCAGGCCGCCCTGTCTCAGGGCCATAATTTC | |
| | GGCATGGGCTGTTGGGTCGTGCAGGCCGATGGCTCTGTTCCAGCCCTCGCCGATCACTCTATTGTTCA | |
| | GCACCAGCACGGCTCCCACAGGCACCTCCCTCTCATCCCGTGCCCTCTTGGCCAGGGTCAGGGCATGT | |
| | CTCATCCAGTACTCGTGGGAAAACTCCACCTCAGASGGSSGGSSGSETPGTSESATPESSGGSSGGSN | |
| | IMNFFKTEITLANGEIRKRPLIETNGETGEIVWDKGRDFATVRKVLSMPQVNIVKKTEVQTGGFSKES | |
| | IRPKRNSDKLIARKKDWDPKKYGGFVSPTVAYSVLVVAKVEKGKSKKLKSVKELLGITIMERSSFEKN | |
| | PIDFLEAKGYKEVKKDLIIKLPKYSLFELENGRKRMLASARFLQKGNELALPSKYVNFLYLASHYEKL | |
| | KGSPEDNEQKQLFVEQHKHYLDEIIEQISEFSKRVILADANLDKVLSAYNKHRDKPIREQAENIIHLF | |
| | TLTNLGAPRAFKYFDTTIDRKVYRSTKEVLDATLIHQSITGLYETRIDLSQLGGDGGSGGSGGSGGSG | |
| | GSGGSGGDKKYSIGLAIGTNSVGWAVITDEYKVPSKKFKVLGNTDRHSIKKNLIGALLFDSGETAEAT | |
| | RLKRTARRRYTRRKNRICYLQEIFSNEMAKVDDSFFHRLEESFLVEEDKKHERHPIFGNIVDEVAYHE | |
| | KYPTIYHLRKKLVDSTDKADLRLIYLALAHMIKFRGHFLIEGDLNPDNSDVDKLFIQLVQTYNQLFEE | |
| | NPINASGVDAKAILSARLSKSRRLENLIAQLPGEKKNGLFGNLIALSLGLTPNFKSNFDLAEDAKLQL | |
| | SKDTYDDDLDNLLAQIGDQYADLFLAAKNLSDAILLSDILRVNTEITKAPLSASMIKRYDEHHQDLTL | |
| | LKALVRQQLPEKYKEIFFDQSKNGYAGYIDGGASQEEFYKFIKPILEKMDGTEELLVKLNREDLLRKQ | |
| | RTFDNGSIPHQIHLGELHAILRRQEDFYPFLKDNREKIEKILTFRIPYYVGPLARGNSRFAWMTRKSE | |
| | ETITPWNFEEVVDKGASAQSFIERMTNFDKNLPNEKVLPKHSLLYEYFTVYNELTKVKYVTEGMRKPA | |
| | FLSGEQKKAIVDLLFKTNRKVTVKQLKEDYFKKIECFDSVEISGVEDRFNASLGTYHDLLKIIKDKDF | |
| | LDNEENEDILEDIVLTLTLFEDREMIEERLKTYAHLFDDKVMKQLKRRRYTGWGRLSRKLINGIRDKQ | |
| | SGKTILDFLKSDGFANRNFMQLIHDDSLTFKEDIQKAQVSGQGDSLHEHIANLAGSPAIKKGILQTVK | |
| | VVDELVKVMGRHKPENIVIEMARENQTTQKGQKNSRERMKRIEEGIKELGSQILKEHPVENTQLQNEK | |
| | LYLYYLQNGRDMYVDQELDINRLSDYDVDHIVPQSFLKDDSIDNKVLTRSDKNRGKSDNVPSEEVVKK | |
| | MKNYWRQLLNAKLITQRKFDNLTKAERGGLSELDKAGFIKRQLVETRQITKHVAQILDSRMNTKYDEN | |
| | DKLIREVKVITLKSKLVSDFRKDFQFYKVREINNYHHAHDAYLNAWGTALIKKYPKLESEFVYGDYK | |
| | VYDVRKMIAKSEQEIGKATAKYFFYSSGGSKRTADGSEFEPKKKRKV | |
| ABE8-SaCas9 | NLS, wtTadA, linker, TadA*, NRCH | 466 |
| editor | Amino Acid Sequence | |
| | MKRTADGSEFESPKKKRKVSEVEFSHEYWMRHALTLAKRAWDEREVPVGAVLVHNNRVIGEGWNRPIG | |
| | RHDPTAHAEIMALRQGGLVMQNYRLIDATLYVTLEPCVMCAGAMIHSRIGRVVFGARDAKTGAAGSLM | |
| | DVLHHPGMNHRVEITEGILADECAALLSDFFRMRRQEIKAQKKAQSSTDSGGSSGGSSGSETPGTSES | |
| | ATPESSGGSSGGSGTTGATGGAGCTCTGGGCCTTCTTCTGAGCATTGAACACCTGTCTAGGCATCCGA | |
| | TAGAAATCGCACAGCAGGGCGGCACATTCATCTGCCAGGATTCCCTCGGTAATTTCGACGCGGTGATT | |
| | CATGCCGGGGTAGTTCAGCACGTTCATCAGGGAGCCTGCGGCGCCTCTTTTTGAGTTCCTCACGCCAA | |
| | ACACCACGCGGCCGATCCTAGAGTGGATCATGGCGCCGGCGCACATCACGCAAGGCTCGAATGTCACG | |
| | TACAGGGTGGCGTCAATCAGTCTGTAGTTCTGCATGACCAGGCCGCCCTGTCTCAGGGCCATAATTTC | |
| | GGCATGGGCTGTTGGGTCGTGCAGGCCGATGGCTCTGTTCCAGCCCTCGCCGATCACTCTATTGTTCA | |
| | GCACCAGCACGGCTCCCACAGGCACCTCCCTCTCATCCCGTGCCCTCTTGGCCAGGGTCAGGGCATGT | |
| | CTCATCCAGTACTCGTGGGAAAACTCCACCTCAGASGGSSGGSSGSETPGTSESATPESSGGSSGGSG | |
| | KRNYILGLAIGITSVGYGIIDYETRDVIDAGVRLFKEANVENNEGRRSKRGARRLKRRRRHRIQRVKK | |
| | LLFDYNLLTDHSELSGINPYEARVKGLSQKLSEEEFSAALLHLAKRRGVHNVNEVEEDTGNELSTKEQ | |
| | ISRNSKALEEKYVAELQLERLKKDGEVRGSINRFKTSDYVKEAKQLLKVQKAYHQLDQSFIDTYIDLL | |
| | ETRRTYYEGPGEGSPFGWKDIKEWYEMLMGHCTYFPEELRSVKYAYNADLYNALNDLNNLVITRDENE | |
| | KLEYYEKFQIIENVFKQKKKPTLKQIAKEILVNEEDIKGYRVTSTGKPEFTNLKVYHDIKDITARKEI | |
| | IENAELLDQIAKILTIYQSSEDIQEELTNLNSELTQEEIEQISNLKGYTGTHNLSLKAINLILDELWH | |
| | TNDNQIAIFNRLKLVPKKVDLSQQKEIPTTLVDDFILSPVVKRSFIQSIKVINAIIKKYGLPNDIIIE | |
| | LAREKNSKDAQKMINEMQKRNRQTNERIEEIIRTTGKENAKYLIEKIKLHDMQEGKCLYSLEAIPLED | |
| | LLNNPFNYEVDHIIPRSVSFDNSFNNKVLVKQEENSKKGNRTPFQYLSSSDSKISYETFKKHILNLAK | |
| | GKGRISKTKKEYLLEERDINRFSVQKDFINRNLVDTRYATRGLMNLLRSYFRVNNLDVKVKSINGGFT | |
| | SFLRRKWKFKKERNKGYKHHAEDALIIANADFIFKEWKKLDKAKKVMENQMFEEKQAESMPEIETEQE | |
| | YKEIFITPHQIKHIKDFKDYKYSHRVDKKPNRELINDTLYSTRKDDKGNTLIVNNLNGLYDKDNDKLK | |
| | KLINKSPEKLLMYHHDPQTYQKLKLIMEQYGDEKNPLYKYYEETGNYLTKYSKKDNGPVIKKIKYYGN | |
| | KLNAHLDITDDYPNSRNKVVKLSLKPYRFDVYLDNGVYKFVTVKNLDVIKKENYYEVNSKCYEEAKKL | |
| | KKISNQAEFIASFYNNDLIKINGELYRVIGVNNDLLNRIEVNMIDITYREYLENMNDKRPPRIIKTIA | |
| | SKTQSIKKYSTDILGNLYEVKSKKHPQIIKKGSGGSKRTADGSEFEPKKKRKV | |
| ABE8-NRCH | NLS, wtTadA, linker, TadA*, NRCH | 467 |
| editor | Amino Acid Sequence | |
| | MKRTADGSEFESPKKKRKVSEVEFSHEYWMRHALTLAKRAWDEREVPVGAVLVHNNRVIGEGWNRPIG | |
| | RHDPTAHAEIMALRQGGLVMQNYRLIDATLYVTLEPCVMCAGAMIHSRIGRVVFGARDAKTGAAGSLM | |
| | DVLHHPGMNHRVEITEGILADECAALLSDFFRMRRQEIKAQKKAQSSTDSGGSSGGSSGSETPGTSES | |
| | AYPESSGGSSGGSGTTGATGGAGCTCTGGGCCTTCTTCTGAGCATTGAACACCTGTCTAGGCATCCGA | |
| | TAGAAATCGCACAGCAGGGCGGCACATTCATCTGCCAGGATTCCCTCGGTAATTTCGACGCGGTGATT | |
| | CATGCCGGGGTAGTTCAGCACGTTCATCAGGGAGCCTGCGGCGCCTCTTTTTGAGTTCCTCACGCCAA | |
| | ACACCACGCGGCCGATCCTAGAGTGGATCATGGCGCCGGCGCACATCACGCAAGGCTCGAATGTCACG | |
| | TACAGGGTGGCGTCAATCAGTCTGTAGTTCTGCATGACCAGGCCGCCCTGTCTCAGGGCCATAATTTC | |
| | GGCATGGGCTGTTGGGTCGTGCAGGCCGATGGCTCTGTTCCAGCCCTCGCCGATCACTCTATTGTTCA | |
| | GCACCAGCACGGCTCCCACAGGCACCTCCCTCTCATCCCGTGCCCTCTTGGCCAGGGTCAGGGCATGT | |
| | CTCATCCAGTACTCGTGGGAAAACTCCACCTCAGASGGSSGGSSGSEYPGYSESAYPESSGGSSGGSD | |
| | KKYSIGLAIGTNSVGWAVITDEYKVPSKKFKVLGNTDRHSIKKNLIGALLFDSGETAEATRLKRTARR | |
| | RYTRRKNRICYLQEIFSNEMAKVDDSFFHRLEESFLVEEDKKHERHPIFGNIVDEVAYHEKYPTIYHL | |
| | RKKLVDSTDKADLRLIYLALAHMIKFRGHFLIEGDLNPDNSDVDKLFIQLVQTYNQLFEENPINASGV | |
| | DAKAILSARLSKSRRLENLIAQLPGEKKNGLFGNLIALSLGLTPNFKSNFDLAEDAKLQLSKDTYDDD | |
| | LDNLLAQIGDQYADLFLAAKNLSDAILLSDILRVNTEITKAPLSASMVKRYDEHHQDLTLLKALVRQQ | |
| | LPEKYKEIFFDQSKNGYAGYIDGGASQEEFYKFIKPILEKMDGTEELLVKLNREDLLRKQRTFDNGII | |
| | PHQIHLGELHAILRRQGDFYPFLKDNREKIEKILTFRIPYYVGPLARGNSRFAWMTRKSEETITPWNF | |
| | EEVVDKGASAQSFIERMTNFDKNLPNEKVLPKHSLLYEYFTVYNELTKVKYVTEGMRKPAFLSGEQKK | |
| | AIVDLLFKTNRKVTVKQLKEDYFKKIECFDSVEISGVEDRFNASLGTYHDLLKIIKDKDFLDNEENED | |
| | ILEDIVLTLTLFEDREMIEERLKTYAHLFDDKVMKQLKRLRYTGWGRLSRKLINGIRDKQSGKTILDF | |
| | LKSDGFANRNFMQLIHDDSLTFKEDIQKAQVSCQGDSLHEHIANLAGSPAIKKGILQTVKVVDELIKV | |
| | MGGHKPENIVIEMARENQTTQKGQKNSRERMKRIEEGIKELGSQILKEHPVENTQLQNEKLYLYYLQN | |
| | GRDMYVDQELDINRLSDYDVDHIVPQSFLKDDSIENKVLTRSDKNRGKSDNVPSEEVVKKMKNYWRQL | |
| | LNAKLITQRKFDNLTKAERGGLSELDKAGFIKRQLAETRQITKHVAQILDSRMNTKYDENDKLIREVK | |
| | VITLKSKLVSDFRKDFQFYKVREINNYHHAHDAYLNAVVGTALIKKYPKLESEFVYGDYKVYDVRKMI | |
| | AKSEQEIGKATAKYFFYSNIMNFFKTEITLANGEIRKRPLIETNGETGEIVWDKGRDFATVRKVLSMP | |
| | QVNIVKKTEVQTGGFSKESILPKGNSDKLIARKKDWDPKKYGGFNSPTVAYSVLVVAKVEKGKSKKLK | |
| | SVKELLGITIMERSSFEKNPIDFLEAKGYKEVKKDLIIKLPKYSLFELENGRKRMLASAGVLQKGNEL | |
| | ALPSKYVNFLYLASHYEKLKGSPEDNEQKQLFVEQHKHYLDEIIEQISEFSKRVILADANLDKVLSAY | |
| | NKHRDKPIREQAENIIHLFTLTNLGAPAAFKYFDTTINRKQYNTTKEVLDATLIRQSITGLYETRIDL | |
| | SQLGGDSGGSKRTADGSEFEPKKKRKV | |
| ABE8-NRRH | NLS, wtTadA, linker, TadA*, NRCH | 468 |
| editor | Amino Acid Sequence | |
| | MKRTADGSEFESPKKKRKVSEVEFSHEYWMRHALTLAKRAWDEREVPVGAVLVHNNRVIGEGWNRPIG | |
| | RHDPTAHAEIMALRQGGLVMQNYRLIDATLYVTLEPCVMCAGAMIHSRIGRVVFGARDAKTGAAGSLM | |
| | DVLHHPGMNHRVEITEGILADECAALLSDFFRMRRQEIKAQKKAQSSTDSGGSSGGSSGSETPGTSES | |
| | ATPESSGGSSGGSGTTGATGGAGCTCTGGGCCTTCTTCTGAGCATTGAACACCTGTCTAGGCATCCGA | |
| | TAGAAATCGCACAGCAGGGCGGCACATTCATCTGCCAGGATTCCCTCGGTAATTTCGACGCGGTGATT | |
| | CATGCCGGGGTAGTTCAGCACGTTCATCAGGGAGCCTGCGGCGCCTCTTTTTGAGTTCCTCACGCCAA | |
| | ACACCACGCGGCCGATCCTAGAGTGGATCATGGCGCCGGCGCACATCACGCAAGGCTCGAATGTCACG | |
| | TACAGGGTGGCGTCAATCAGTCTGTAGTTCTGCATGACCAGGCCGCCCTGTCTCAGGGCCATAATTTC | |
| | GGCATGGGCTGTTGGGTCGTGCAGGCCGATGGCTCTGTTCCAGCCCTCGCCGATCACTCTATTGTTCA | |
| | GCACCAGCACGGCTCCCACAGGCACCTCCCTCTCATCCCGTGCCCTCTTGGCCAGGGTCAGGGCATGT | |
| | CTCATCCAGTACTCGTGGGAAAACTCCACCTCAGASGGSSGGSSGSETPGTSESATPESSGGSSGGSD | |
| | KKYSIGLAIGTNSVGWAVITDEYKVPSKKFKVLGNTDRHSIKKNLIGALLFDSGETAEATRLKRTARR | |
| | RYTRRKNRICYLQEIFSNEMAKVDDSFFHRLEESFLVEEDKKHERHPIFGNIVDEVAYHEKYPTIYHL | |
| | RKKLVDSTDKADLRLIYLALAHMIKFRGHFLIEGDLNPDNSDVDKLFIQLVQTYNQLFEENPINASGV | |
| | DAKAILSARLSKSRRLENLIAQLPGEKKNGLFGNLIALSLGLTPNFKSNFDLAEDAKLQLSKDTYDDD | |
| | LDNLLAQIGDQYADLFLAAKNLSDAILLSDILRVNTEITKAPLSASMVKRYDEHHQDLTLLKALVRQQ | |
| | LPEKYKEIFFDQSKNGYAGYIDGGASQEEFYKFIKPILEKMDGTEELLVKLNREDLLRKQRTFDNGII | |
| | PHQIHLGELHAILRRQGDFYPFLKDNREKIEKILTFRIPYYVGPLARGNSRFAWMTRKSEETITPWNF | |
| | EEVVDKGASAQSFIERMTNFDKNLPNEKVLPKHSLLYEYFTVYNELTKVKYVTEGMRKPAFLSGEQKK | |
| | AIVDLLFKTNRKVTVKQLKEDYFKKIECFDSVEISGVEDRFNASLGTYHDLLKIIKDKDFLDNEENED | |
| | ILEDIVLTLTLFEDREMIEERLKTYAHLFDDKVMKQLKRLRYTGWGRLSRKLINGIRDKQSGKTILDF | |
| | LKSDGFANRNFMQLIHDDSLTFKEDIQKAQVSCQGDSLHEHIANLAGSPAIKKGILQTVKVVDELIKV | |
| | MGGHKPENIVIEMARENQTTQKGQKNSRERMKRIEEGIKELGSQILKEHPVENTQLQNEKLYLYYLQN | |
| | GRDMYVDQELDINRLSDYDVDHIVPQSFLKDDSIENKVLTRSDKNRGKSDNVPSEEVVKKMKNYWRQL | |
| | LNAKLITQRKFDNLTKAERGGLSELDKAGFIKRQLAETRQITKHVAQILDSRMNTKYDENDKLIREVK | |
| | VITLKSKLVSDFRKDFQFYKVREINNYHHAHDAYLNAVVGTALIKKYPKLESEFVYGDYKVYDVRKMI | |
| | AKSEQEIGKATAKYFFYSNIMNFFKTEITLANGEIRKRPLIETNGETGEIVWDKGRDFATVRKVLSMP | |
| | QVNIVKKTEVQTGGFSKESILPKGNSDKLIARKKDWDPKKYGGFNSPTAAYSVLVVAKVEKGKSKKLK | |
| | SVKELLGITIMERSSFEKNPIGFLEAKGYKEVKKDLIIKLPKYSLFELENGRKRMLASAGVLHKGNEL | |
| | ALPSKYVNFLYLASHYEKLKGSPEDNEQKQLFVEQHKHYLDEIIEQISEFSKRVILADANLDKVLSAY | |
| | NKHRDKPIREQAENIIHLFTLTNLGVPAAFKYFDTTIDKKRYTSTKEVLDATLIHQSITGLYETRIDL | |
| | SQLGGDSGGSKRTADGSEFEPKKKRKV | |
| ABE8-SaKKH | NLS, wtTadA, linker, TadA*, NRCH | 469 |
| editor | Amino Acid Sequence | |
| | MKRTADGSEFESPKKKRKVSEVEFSHEYWMRHALTLAKRAWDEREVPVGAVLVHNNRVIGEGWNRPIG | |
| | RHDPTAHAEIMALRQGGLVMQNYRLIDATLYVTLEPCVMCAGAMIHSRIGRVVFGARDAKTGAAGSLM | |
| | DVLHHPGMNHRVEITEGILADECAALLSDFFRMRRQEIKAQKKAQSSTDSGGSSGGSSGSETPGTSES | |
| | ATPESSGGSSGGSGTTGATGGAGCTCTGGGCCTTCTTCTGAGCATTGAACACCTGTCTAGGCATCCGA | |
| | TAGAAATCGCACAGCAGGGCGGCACATTCATCTGCCAGGATTCCCTCGGTAATTTCGACGCGGTGATT | |
| | CATGCCGGGGTAGTTCAGCACGTTCATCAGGGAGCCTGCGGCGCCTCTTTTTGAGTTCCTCACGCCAA | |
| | ACACCACGCGGCCGATCCTAGAGTGGATCATGGCGCCGGCGCACATCACGCAAGGCTCGAATGTCACG | |
| | TACAGGGTGGCGTCAATCAGTCTGTAGTTCTGCATGACCAGGCCGCCCTGTCTCAGGGCCATAATTTC | |
| | GGCATGGGCTGTTGGGTCGTGCAGGCCGATGGCTCTGTTCCAGCCCTCGCCGATCACTCTATTGTTCA | |
| | GCACCAGCACGGCTCCCACAGGCACCTCCCTCTCATCCCGTGCCCTCTTGGCCAGGGTCAGGGCATGT | |
| | CTCATCCAGTACTCGTGGGAAAACTCCACCTCAGASGGSSGGSSGSETPGTSESATPESSGGSSGGSG | |
| | GGAAGCGAAATTACATTCTGGGGCTGGCCATTGGCATTACATCAGTGGGCTATGGCATCATTGACTAC | |
| | GAGACAAGGGACGTGATCGACGCCGGCGTGAGACTGTTCAAGGAGGCCAACGTGGAGAACAATGAGGG | |
| | CCGGAGATCCAAGAGGGGAGCAAGGCGCCTGAAGCGGAGAAGGCGCCACAGAATCCAGAGAGTGAAGA | |
| | AGCTGCTGTTCGATTACAACCTGCTGACCGACCACTCCGAGCTGTCTGGCATCAATCCTTATGAGGCC | |
| | AGAGTGAAGGGCCTGTCCCAGAAGCTGTCTGAGGAGGAGTTTAGCGCCGCCCTGCTGCACCTGGCAAA | |
| | GAGGAGAGGCGTGCACAACGTGAATGAGGTGGAGGAGGACACCGGCAACGAGCTGTCCACAAAGGAGC | |
| | AGATCAGCCGCAATTCCAAGGCCCTGGAGGAGAAGTATGTGGCCGAGCTGCAGCTGGAGCGGCTGAAG | |
| | AAGGATGGCGAGGTGAGGGGCTCCATCAATCGCTTCAAGACCTCTGACTACGTGAAGGAGGCCAAGCA | |
| | GCTGCTGAAGGTGCAGAAGGCCTACCACCAGCTGGATCAGTCCTTTATCGATACATATATCGACCTGC | |
| | TGGAGACAAGGCGCACATACTATGAGGGACCAGGAGAGGGCTCTCCCTTCGGCTGGAAGGACATCAAG | |
| | GAGTGGTACGAGATGCTGATGGGCCACTGCACCTATTTTCCAGAGGAGCTGAGAAGCGTGAAGTACGC | |
| | CTATAACGCCGATCTGTACAACGCCCTGAATGACCTGAACAACCTGGTCATCACCAGGGATGAGAACG | |
| | AGAAGCTGGAGTACTATGAGAAGTTCCAGATCATCGAGAACGTGTTCAAGCAGAAGAAGAAGCCTACA | |
| | CTGAAGCAGATCGCCAAGGAGATCCTGGTGAACGAGGAGGACATCAAGGGCTACCGCGTGACCTCCAC | |
| | AGGCAAGCCAGAGTTCACCAATCTGAAGGTGTATCACGATATCAAGGACATCACAGCCCGGAAGGAGA | |
| | TCATCGAGAACGCCGAGCTGCTGGATCAGATCGCCAAGATCCTGACCATCTATCAGAGCTCCGAGGAC | |
| | ATCCAGGAGGAGCTGACCAACCTGAATAGCGAGCTGACACAGGAGGAGATCGAGCAGATCAGCAATCT | |
| | GAAGGGCTACACCGGCACACACAACCTGAGCCTGAAGGCCATCAATCTGATCCTGGATGAGCTGTGGC | |
| | ACACAAACGACAATCAGATCGCCATCTTTAACCGGCTGAAGCTGGTGCCAAAGAAGGTGGACCTGTCC | |
| | CAGCAGAAGGAGATCCCAACCACACTGGTGGACGATTTCATCCTGTCTCCCGTGGTGAAGCGGAGCTT | |
| | CATCCAGAGCATCAAAGTGATCAACGCCATCATCAAGAAGTACGGCCTGCCCAATGATATCATCATCG | |
| | AGCTGGCCAGGGAGAAGAACTCCAAGGACGCCCAGAAGATGATCAATGAGATGCAGAAGAGGAACCGC | |
| | CAGACCAATGAGCGGATCGAGGAGATCATCAGAACCACAGGCAAGGAGAACGCCAAGTACCTGATCGA | |
| | GAAGATCAAGCTGCACGATATGCAGGAGGGCAAGTGTCTGTATTCTCTGGAGGCCATCCCTCTGGAGG | |
| | ACCTGCTGAACAATCCATTCAACTACGAGGTGGATCACATCATCCCCCGGAGCGTGAGCTTCGACAAT | |
| | TCTTTTAACAATAAGGTGCTGGTGAAGCAGGAGGAGAACAGCAAGAAGGGCAATAGGACCCCTTTCCA | |
| | GTACCTGTCTAGCTCCGATTCTAAGATCAGCTACGAGACATTCAAGAAGCACATCCTGAATCTGGCCA | |
| | AGGGCAAGGGCCGCATCAGCAAGACCAAGAAGGAGTACCTGCTGGAGGAGCGGGACATCAACAGATTC | |
| | TCCGTGCAGAAGGACTTCATCAACCGGAATCTGGTGGACACCAGATACGCCACACGCGGCCTGATGAA | |
| | TCTGCTGCGGTCTTATTTCAGAGTGAACAATCTGGATGTGAAGGTGAAGAGCATCAACGGCGGCTTCA | |
| | CCTCCTTTCTGCGGAGAAAGTGGAAGTTTAAGAAGGAGCGCAACAAGGGCTATAAGCACCACGCCGAG | |
| | GATGCCCTGATCATCGCCAATGCCGACTTCATCTTTAAGGAGTGGAAGAAGCTGGACAAGGCCAAGAA | |
| | AGTGATGGAGAACCAGATGTTCGAGGAGAAGCAGGCCGAGAGCATGCCCGAGATCGAGACAGAGCAGG | |
| | AGTACAAGGAGATTTTCATCACACCTCACCAGATCAAGCACATCAAGGACTTCAAGGACTACAAGTAT | |
| | TCTCACAGGGTGGATAAGAAGCCCAACCGCAAGCTGATCAATGACACCCTGTATAGCACACGGAAGGA | |
| | CGATAAGGGCAATACCCTGATCGTGAACAATCTGAACGGCCTGTACGACAAGGATAATGACAAGCTGA | |
| | AGAAGCTGATCAACAAGTCTCCCGAGAAGCTGCTGATGTACCACCACGATCCTCAGACATATCAGAAG | |
| | CTGAAGCTGATCATGGAGCAGTACGGCGACGAGAAGAACCCACTGTATAAGTACTATGAGGAGACAGG | |
| | CAACTACCTGACAAAGTATAGCAAGAAGGATAATGGCCCCGTGATCAAGAAGATCAAGTACTATGGCA | |
| | ACAAGCTGAATGCCCACCTGGACATCACCGACGATTACCCTAACTCTCGCAATAAGGTGGTGAAGCTG | |
| | AGCCTGAAGCCATACCGGTTCGACGTGTACCTGGACAACGGCGTGTATAAGTTTGTGACAGTGAAGAA | |
| | TCTGGATGTGATCAAGAAGGAGAACTACTATGAGGTGAACAGCAAGTGCTACGAGGAGGCCAAGAAGC | |
| | TGAAGAAGATCAGCAACCAGGCCGAGTTCATCGCCTCTTTTTACAAGAATGACCTGATCAAGATCAAT | |
| | GGCGAGCTGTATAGAGTGATCGGCGTGAACAATGATCTGCTGAACAGAATCGAAGTGAATATGATCGA | |
| | CATCACCTACAGGGAGTATCTGGAGAACATGAATGATAAGAGGCCCCCTCATATCATCAAGACCATCG | |
| | CCTCTAAGACACAGAGCATCAAGAAGTACAGCACAGACATCCTGGGGAACCTGTATGAAGTCAAGAGC | |
| | AAGAAACATCCTCAGATTATCAAGAAAGGCSGGSKRTAEGSEFEPRKKRKV | |
| ABE8-NG editor | NLS, wtTadA, linker, TadA*, NRCH | 470 |
| | Amino Acid Sequence | |
| | MKRTADGSEFESPKKKRKVSEVEFSHEYWMRHALTLAKRAWDEREVPVGAVLVHNNRVIGEGWNRPIG | |
| | RHDPTAHAEIMALRQGGLVMQNYRLIDATLYVTLEPCVMCAGAMIHSRIGRVVFGARDAKTGAAGSLM | |
| | DVLHHPGMNHRVEITEGILADECAALLSDFFRMRRQEIKAQKKAQSSTDSGGSSGGSSGSETPGTSES | |
| | ATPESSGGSSGGSGTTGATGGAGCTCTGGGCCTTCTTCTGAGCATTGAACACCTGTCTAGGCATCCGA | |
| | TAGAAATCGCACAGCAGGGCGGCACATTCATCTGCCAGGATTCCCTCGGTAATTTCGACGCGGTGATT | |
| | CATGCCGGGGTAGTTCAGCACGTTCATCAGGGAGCCTGCGGCGCCTCTTTTTGAGTTCCTCACGCCAA | |
| | ACACCACGCGGCCGATCCTAGAGTGGATCATGGCGCCGGCGCACATCACGCAAGGCTCGAATGTCACG | |
| | TACAGGGTGGCGTCAATCAGTCTGTAGTTCTGCATGACCAGGCCGCCCTGTCTCAGGGCCATAATTTC | |
| | GGCATGGGCTGTTGGGTCGTGCAGGCCGATGGCTCTGTTCCAGCCCTCGCCGATCACTCTATTGTTCA | |
| | GCACCAGCACGGCTCCCACAGGCACCTCCCTCTCATCCCGTGCCCTCTTGGCCAGGGTCAGGGCATGT | |
| | CTCATCCAGTACTCGTGGGAAAACTCCACCTCAGASGGSSGGSSGSETPGTSESATPESSGGSSGGSD | |
| | KKYSIGLAIGTNSVGWAVITDEYKVPSKKFKVLGNTDRHSIKKNLIGALLFDSGEIAEATRLKRTARR | |
| | RYTRRKNRICYLQEIFSNEMAKVDDSFFHRLEESFLVEEDKKHERHPIFGNIVDEVAYHEKYPTIYHL | |
| | RKKLVDSTDKADLRLIYLALAHMIKFRGHFLIEGDLNPDNSDVDKLFIQLVQTYNQLFEENPINASGV | |
| | DAKAILSARLSKSRRLENLIAQLPGEKKNGLFGNLIALSLGLTPNFKSNFDLAEDAKLQLSKDTYDDD | |
| | LDNLLAQIGDQYADLFLAAKNLSDAILLSDILRVNTEITKAPLSASMIKRYDEHHQDLTLLKALVRQQ | |
| | LPEKYKEIFFDQSKNGYAGYIDGGASQEEFYKFIKPILEKMDGTEELLVKLNREDLLRKQRTFDNGSI | |
| | PHQIHLGELHAILRRQEDFYPFLKDNREKIEKILTFRIPYYVGPLARGNSRFAWMTRKSEETITPWNF | |
| | EEVVDKGASAQSFIERMTNFDKNLPNEKVLPKHSLLYEYFTVYNELTKVKYVTEGMRKPAFLSGEQKK | |
| | AIVDLLFKTNRKVTVKQLKEDYFKKIECFDSVEISGVEDRFNASLGTYHDLLKIIKDKDFLDNEENED | |
| | ILEDIVLTLTLFEDREMIEERLKTYAHLFDDKVMKQLKRRRYTGWGRLSRKLINGIRDKQSGKTILDF | |
| | LKSDGFANRNFMQLIHDDSLTFKEDIQKAQVSGQGDSLHEHIANLAGSPAIKKGILQTVKVVDELVKV | |
| | MGRHKPENIVIEMARENQTTQKGQKNSRERMKRIEEGIKELGSQILKEHPVENTQLQNEKLYLYYLQN | |
| | GRDMYVDQELDINRLSDYDVDHIVPQSFLKDDSIDNKVLTRSDKNRGKSDNVPSEEVVKKMKNYWRQL | |
| | LNAKLITQRKFDNLTKAERGGLSELDKAGFIKRQLVETRQITKHVAQILDSRMNTKYDENDKLIREVK | |
| | VITLKSKLVSDFRKDFQFYKVREINNYHHAHDAYLNAVVGTALIKKYPKLESEFVYGDYKVYDVRKMI | |
| | AKSEQEIGKATAKYFFYSNIMNFFKTEITLANGEIRKRPLIETNGETGEIVWDKGRDFATVRKVLSMP | |
| | QVNIVKKTEVQTGGFSKESIRPKRNSDKLIARKKDWDPKKYGGFVSPTVAYSVLVVAKVEKGKSKKLK | |
| | SVKELLGITIMERSSFEKNPIDFLEAKGYKEVKKDLIIKLPKYSLFELENGRKRMLASARFLQKGNEL | |
| | ALPSKYVNFLYLASHYEKLKGSPEDNEQKQLFVEQHKHYLDEIIEQISEFSKRVILADANLDKVLSAY | |
| | NKHRDKPIREQAENIIHLFTLTNLGAPRAFKYFDTTIDRKVYRSTKEVLDATLIHQSITGLYETRIDL | |
| | SQLGGDSGGSKRTADGSEFEPKKKRKV | |
| ABE8-CP1041 | NLS, wtTadA, linker, TadA*, NRCH | 471 |
| editor | Amino Acid Sequence | |
| | MKRTADGSEFESPKKKRKVSEVEFSHEYWMRHALTLAKRAWDEREVPVGAVLVHNNRVIGEGWNRPIG | |
| | RHDPTAHAEIMALRQGGLVMQNYRLIDATLYVTLEPCVMCAGAMIHSRIGRVVFGARDAKTGAAGSLM | |
| | DVLHHPGMNHRVEITEGILADECAALLSDFFRMRRQEIKAQKKAQSSTDSGGSSGGSSGSETPGTSES | |
| | ATPESSGGSSGGSGTTGATGGAGCTCTGGGCCTTCTTCTGAGCATTGAACACCTGTCTAGGCATCCGA | |
| | TAGAAATCGCACAGCAGGGCGGCACATTCATCTGCCAGGATTCCCTCGGTAATTTCGACGCGGTGATT | |
| | CATGCCGGGGTAGTTCAGCACGTTCATCAGGGAGCCTGCGGCGCCTCTTTTTGAGTTCCTCACGCCAA | |
| | ACACCACGCGGCCGATCCTAGAGTGGATCATGGCGCCGGCGCACATCACGCAAGGCTCGAATGTCACG | |
| | TACAGGGTGGCGTCAATCAGTCTGTAGTTCTGCATGACCAGGCCGCCCTGTCTCAGGGCCATAATTTC | |
| | GGCATGGGCTGTTGGGTCGTGCAGGCCGATGGCTCTGTTCCAGCCCTCGCCGATCACTCTATTGTTCA | |
| | GCACCAGCACGGCTCCCACAGGCACCTCCCTCTCATCCCGTGCCCTCTTGGCCAGGGTCAGGGCATGT | |
| | CTCATCCAGTACTCGTGGGAAAACTCCACCTCAGASGGSSGGSSGSETPGTSESATPESSGGSSGGSN | |
| | IMNFFKTEITLANGEIRKRPLIETNGETGEIVWDKGRDFATVRKVLSMPQVNIVKKTEVQTGGFSKES | |
| | ILPKRNSDKLIARKKDWDPKKYGGFDSPTVAYSVLVVAKVEKGKSKKLKSVKELLGITIMERSSFEKN | |
| | PIDFLEAKGYKEVKKDLIIKLPKYSLFELENGRKRMLASAGELQKGNELALPSKYVNFLYLASHYEKL | |
| | KGSPEDNEQKQLFVEQHKHYLDEIIEQISEFSKRVILADANLDKVLSAYNKHRDKPIREQAENIIHLF | |
| | TLTNLGAPAAFKYFDTTIDRKRYTSTKEVLDATLIHQSITGLYETRIDLSQLGGDGGSGGSGGSGGSG | |
| | GSGGSGGDKKYSIGLAIGTNSVGWAVITDEYKVPSKKFKVLGNTDRHSIKKNLIGALLFDSGETAEAT | |
| | RLKRTARRRYTRRKNRICYLQEIFSNEMAKVDDSFFHRLEESFLVEEDKKHERHPIFGNIVDEVAYHE | |
| | KYPTIYHLRKKLVDSTDKADLRLIYLALAHMIKFRGHFLIEGDLNPDNSDVDKLFIQLVQTYNQLFEE | |
| | NPINASGVDAKAILSARLSKSRRLENLIAQLPGEKKNGLFGNLIALSLGLTPNFKSNFDLAEDAKLQL | |
| | SKDTYDDDLDNLLAQIGDQYADLFLAAKNLSDAILLSDILRVNTEITKAPLSASMIKRYDEHHQDLTL | |
| | LKALVRQQLPEKYKEIFFDQSKNGYAGYIDGGASQEEFYKFIKPILEKMDGTEELLVKLNREDLLRKQ | |
| | RTFDNGSIPHQIHLGELHAILRRQEDFYPFLKDNREKIEKILTFRIPYYVGPLARGNSRFAWMTRKSE | |
| | ETITPWNFEEVVDKGASAQSFIERMTNFDKNLPNEKVLPKHSLLYEYFTVYNELTKVKYVTEGMRKPA | |
| | FLSGEQKKAIVDLLFKTNRKVTVKQLKEDYFKKIECFDSVEISGVEDRFNASLGTYHDLLKIIKDKDF | |
| | LDNEENEDILEDIVLTLTLFEDREMIEERLKTYAHLFDDKVMKQLKRRRYTGWGRLSRKLINGIRDKQ | |
| | SGKTILDFLKSDGFANRNFMQLIHDDSLTFKEDIQKAQVSGQGDSLHEHIANLAGSPAIKKGILQTVK | |
| | VVDELVKVMGRHKPENIVIEMARENQTTQKGQKNSRERMKRIEEGIKELGSQILKEHPVENTQLQNEK | |
| | LYLYYLQNGRDMYVDQELDINRLSDYDVDHIVPQSFLKDDSIDNKVLTRSDKNRGKSDNVPSEEVVKK | |
| | MKNYWRQLLNAKLITQRKFDNLTKAERGGLSELDKAGFIKRQLVETRQITKHVAQILDSRMNTKYDEN | |
| | DKLIREVKVITLKSKLVSDFRKDFQFYKVREINNYHHAHDAYLNAVVGTALIKKYPKLESEFVYGDYK | |
| | VYDVRKMIAKSEQEIGKATAKYFFYSSGGSKRTADGSEFEPKKKRKV | |
| ABE8-CP1028 | NLS, wtTadA, linker, TadA*, NRCH | 472 |
| editor | Amino Acid Sequence | |
| | MKRTADGSEFESPKKKRKVSEVEFSHEYWMRHALTLAKRAWDEREVPVGAVLVHNNRVIGEGWNRPIG | |
| | RHDPTAHAEIMALRQGGLVMQNYRLIDATLYVTLEPCVMCAGAMIHSRIGRVVFGARDAKTGAAGSLM | |
| | DVLHHPGMNHRVEITEGILADECAALLSDFFRMRRQEIKAQKKAQSSTDSGGSSGGSSGSETPGTSES | |
| | ATPESSGGSSGGSGTTGATGGAGCTCTGGGCCTTCTTCTGAGCATTGAACACCTGTCTAGGCATCCGA | |
| | TAGAAATCGCACAGCAGGGCGGCACATTCATCTGCCAGGATTCCCTCGGTAATTTCGACGCGGTGATT | |
| | CATGCCGGGGTAGTTCAGCACGTTCATCAGGGAGCCTGCGGCGCCTCTTTTTGAGTTCCTCACGCCAA | |
| | ACACCACGCGGCCGATCCTAGAGTGGATCATGGCGCCGGCGCACATCACGCAAGGCTCGAATGTCACG | |
| | TACAGGGTGGCGTCAATCAGTCTGTAGTTCTGCATGACCAGGCCGCCCTGTCTCAGGGCCATAATTTC | |
| | GGCATGGGCTGTTGGGTCGTGCAGGCCGATGGCTCTGTTCCAGCCCTCGCCGATCACTCTATTGTTCA | |
| | GCACCAGCACGGCTCCCACAGGCACCTCCCTCTCATCCCGTGCCCTCTTGGCCAGGGTCAGGGCATGT | |
| | CTCATCCAGTACTCGTGGGAAAACTCCACCTCAGASGGSSGGSSGSETPGTSESATPESSGGSSGGSE | |
| | IGKATAKYFFYSNIMNFFKTEITLANGEIRKRPLIETNGETGEIVWDKGRDFATVRKVLSMPQVNIVK | |
| | KTEVQTGGFSKESILPKRNSDKLIARKKDWDPKKYGGFDSPTVAYSVLVVAKVEKGKSKKLKSVKELL | |
| | GITIMERSSFEKNPIDFLEAKGYKEVKKDLIIKLPKYSLFELENGRKRMLASAGELQKGNELALPSKY | |
| | VNFLYLASHYEKLKGSPEDNEQKQLFVEQHKHYLDEIIEQISEFSKRVILADANLDKVLSAYNKHRDK | |
| | PIREQAENIIHLFTLTNLGAPAAFKYFDTTIDRKRYTSTKEVLDATLIHQSITGLYETRIDLSQLGGD | |
| | GGSGGSGGSGGSGGSGGSGGMDKKYSIGLAIGTNSVGWAVITDEYKVPSKKFKVLGNTDRHSIKKNLI | |
| | GALLFDSGETAEATRLKRTARRRYTRRKNRICYLQEIFSNEMAKVDDSFFHRLEESFLVEEDKKHERH | |
| | PIFGNIVDEVAYHEKYPTIYHLRKKLVDSTDKADLRLIYLALAHMIKFRGHFLIEGDLNPDNSDVDKL | |
| | FIQLVQTYNQLFEENPINASGVDAKAILSARLSKSRRLENLIAQLPGEKKNGLFGNLIALSLGLTPNF | |
| | KSNFDLAEDAKLQLSKDTYDDDLDNLLAQIGDQYADLFLAAKNLSDAILLSDILRVNTEITKAPLSAS | |
| | MIKRYDEHHQDLTLLKALVRQQLPEKYKEIFFDQSKNGYAGYIDGGASQEEFYKFIKPILEKMDGTEE | |
| | LLVKLNREDLLRKQRTFDNGSIPHQIHLGELHAILRRQEDFYPFLKDNREKIEKILTFRIPYYVGPLA | |
| | RGNSRFAWMTRKSEETITPWNFEEVVDKGASAQSFIERMTNFDKNLPNEKVLPKHSLLYEYFTVYNEL | |
| | TKVKYVTEGMRKPAFLSGEQKKAIVDLLFKTNRKVTVKQLKEDYFKKIECFDSVEISGVEDRFNASLG | |
| | TYHDLLKIIKDKDFLDNEENEDILEDIVLTLTLFEDREMIEERLKTYAHLFDDKVMKQLKRRRYTGWG | |
| | RLSRKLINGIRDKQSGKTILDFLKSDGFANRNFMQLIHDDSLTFKEDIQKAQVSGQGDSLHEHIANLA | |
| | GSPAIKKGILQTVKVVDELVKVMGRHKPENIVIEMARENQTTQKGQKNSRERMKRIEEGIKELGSQIL | |
| | KEHPVENTQLQNEKLYLYYLQNGRDMYVDQELDINRLSDYDVDHIVPQSFLKDDSIDNKVLTRSDKNR | |
| | GKSDNVPSEEVVKKMKNYWRQLLNAKLITQRKFDNLTKAERGGLSELDKAGFIKRQLVETRQITKHVA | |
| | QILDSRMNTKYDENDKLIREVKVITLKSKLVSDFRKDFQFYKVREINNYHHAHDAYLNAWGTALIKK | |
| | YPKLESEFVYGDYKVYDVRKMIAKSEQSGGSKRTADGSEFEPKKKRKV | |
| ABE8-CPF1 | NLS, wtTadA, linker, TadA*, NRCH | 473 |
| editor | Amino Acid Sequence | |
| | MKRTADGSEFESPKKKRKVSEVEFSHEYWMRHALTLAKRAWDEREVPVGAVLVHNNRVIGEGWNRPIG | |
| | RHDPTAHAEIMALRQGGLVMQNYRLIDATLYVTLEPCVMCAGAMIHSRIGRVVFGARDAKTGAAGSLM | |
| | DVLHHPGMNHRVEITEGILADECAALLSDFFRMRRQEIKAQKKAQSSTDSGGSSGGSSGSETPGTSES | |
| | ATPESSGGSSGGSGTTGATGGAGCTCTGGGCCTTCTTCTGAGCATTGAACACCTGTCTAGGCATCCGA | |
| | TAGAAATCGCACAGCAGGGCGGCACATTCATCTGCCAGGATTCCCTCGGTAATTTCGACGCGGTGATT | |
| | CATGCCGGGGTAGTTCAGCACGTTCATCAGGGAGCCTGCGGCGCCTCTTTTTGAGTTCCTCACGCCAA | |
| | ACACCACGCGGCCGATCCTAGAGTGGATCATGGCGCCGGCGCACATCACGCAAGGCTCGAATGTCACG | |
| | TACAGGGTGGCGTCAATCAGTCTGTAGTTCTGCATGACCAGGCCGCCCTGTCTCAGGGCCATAATTTC | |
| | GGCATGGGCTGTTGGGTCGTGCAGGCCGATGGCTCTGTTCCAGCCCTCGCCGATCACTCTATTGTTCA | |
| | GCACCAGCACGGCTCCCACAGGCACCTCCCTCTCATCCCGTGCCCTCTTGGCCAGGGTCAGGGCATGT | |
| | CTCATCCAGTACTCGTGGGAAAACTCCACCTCAGASGGSSGGSSGSETPGTSESATPESSGGSSGGSS | |
| | KLEKFTNCYSLSKTLRFKAIPVGKTQENIDNKRLLVEDEKRAEDYKGVKKLLDRYYLSFINDVLHSIK | |
| | LKNLNNYISLFRKKTRTEKENKELENLEINLRKEIAKAFKGNEGYKSLFKKDIIETILPEFLDDKDEI | |
| | ALVNSFNGFTTAFTGFFDNRENMFSEEAKSTSIAFRCINENLTRYISNMDIFEKVDAIFDKHEVQEIK | |
| | EKILNSDYDVEDFFEGEFFNFVLTQEGIDVYNAIIGGFVTESGEKIKGLNEYINLYNQKTKQKLPKFK | |
| | PLYKQVLSDRESLSFYGEGYTSDEEVLEVFRNTLNKNSEIFSSIKKLEKLFKNFDEYSSAGIFVKNGP | |
| | AISTISKDIFGEWNVIRDKVVNAEYDDIHLKKKAWTEKYEDDRRKSFKKIGSFSLEQLQEYADADLSV | |
| | VEKLKEIIIQKVDEIYKVYGSSEKLFDADFVLEKSLKKNDAVVAIMKDLLDSVKSFENYIKAFFGEGK | |
| | ETNRDESFYGDFVLAYDILLKVDHIYDAIRNYVTQKPYSKDKFKLYFQNPQFMGGWDKDKETDYRATI | |
| | LRYGSKYYLAIMDKKYAKCLQKIDKDDVNGNYEKINYKLLPGPNKMLPKVFFSKKWMAYYNPSEDIQK | |
| | IYKNGTFKKGDMFNLNDCHKLIDFFKDSISRYPKWSNAYDFNFSETEKYKDIAGFYREVEEQGYKVSF | |
| | ESASKKEVDKLVEEGKLYMFQIYNKDFSDKSHGTPNLHTMYFKLLFDENNHGQIRLSGGAELFMRRAS | |
| | LKKEELVVHPANSPIANKNPDNPKKTTTLSYDVYKDKRFSEDQYELHIPIAINKCPKNIFKINTEVRV | |
| | LLKHDDNPYVIGIARGERNLLYIVVVDGKGNIVEQYSLNEIINNFNGIRIKTDYHSLLDKKEKERFEA | |
| | RQNWTSIENIKELKAGYISQVVHKICELVEKYDAVIALEDLNSGFKNSRVKVEKQVYQKFEKMLIDKL | |
| | NYMVDKKSNPCATGGALKGYQITNKFESFKSMSTQNGFIFYIPAWLTSKIDPSTGFVNLLKTKYTSIA | |
| | DSKKFISSFDRIMYVPEEDLFEFALDYKNFSRTDADYIKKWKLYSYGNRIRIFRNPKKNNVFDWEEVC | |
| | LTSAYKELFNKYGINYQQGDIRALLCEQSDKAFYSSFMALMSLMLQMRNSITGRTDVDFLISPVKNSD | |
| | GIFYDSRNYEAQENAILPKNADANGAYNIARKVLWAIGQFKKAEDEKLDKVKIAISNKEWLEYAQTSV | |
| | KSGGSKRTADGSEFEPKKKRKV | |
| ABE8-VRQR | NLS, wtTadA, linker, TadA*, NRCH | 474 |
| editor | Amino Acid Sequence | |
| | MKRTADGSEFESPKKKRKVSEVEFSHEYWMRHALTLAKRAWDEREVPVGAVLVHNNRVIGEGWNRPIG | |
| | RHDPTAHAEIMALRQGGLVMQNYRLIDATLYVTLEPCVMCAGAMIHSRIGRVVFGARDAKTGAAGSLM | |
| | DVLHHPGMNHRVEITEGILADECAALLSDFFRMRRQEIKAQKKAQSSTDSGGSSGGSSGSETPGTSES | |
| | ATPESSGGSSGGSGTTGATGGAGCTCTGGGCCTTCTTCTGAGCATTGAACACCTGTCTAGGCATCCGA | |
| | TAGAAATCGCACAGCAGGGCGGCACATTCATCTGCCAGGATTCCCTCGGTAATTTCGACGCGGTGATT | |
| | CATGCCGGGGTAGTTCAGCACGTTCATCAGGGAGCCTGCGGCGCCTCTTTTTGAGTTCCTCACGCCAA | |
| | ACACCACGCGGCCGATCCTAGAGTGGATCATGGCGCCGGCGCACATCACGCAAGGCTCGAATGTCACG | |
| | TACAGGGTGGCGTCAATCAGTCTGTAGTTCTGCATGACCAGGCCGCCCTGTCTCAGGGCCATAATTTC | |
| | GGCATGGGCTGTTGGGTCGTGCAGGCCGATGGCTCTGTTCCAGCCCTCGCCGATCACTCTATTGTTCA | |
| | GCACCAGCACGGCTCCCACAGGCACCTCCCTCTCATCCCGTGCCCTCTTGGCCAGGGTCAGGGCATGT | |
| | CTCATCCAGTACTCGTGGGAAAACTCCACCTCAGASGGSSGGSSGSETPGTSESATPESSGGSSGGSD | |
| | KKYSIGLAIGTNSVGWAVITDEYKVPSKKFKVLGNTDRHSIKKNLIGALLFDSGETAEATRLKRTARR | |
| | RYTRRKNRICYLQEIFSNEMAKVDDSFFHRLEESFLVEEDKKHERHPIFGNIVDEVAYHEKYPTIYHL | |
| | RKKLVDSTDKADLRLIYLALAHMIKFRGHFLIEGDLNPDNSDVDKLFIQLVQTYNQLFEENPINASGV | |
| | DAKAILSARLSKSRRLENLIAQLPGEKKNGLFGNLIALSLGLTPNFKSNFDLAEDAKLQLSKDTYDDD | |
| | LDNLLAQIGDQYADLFLAAKNLSDAILLSDILRVNTEITKAPLSASMIKRYDEHHQDLTLLKALVRQQ | |
| | LPEKYKEIFFDQSKNGYAGYIDGGASQEEFYKFIKPILEKMDGTEELLVKLNREDLLRKQRTFDNGSI | |
| | PHQIHLGELHAILRRQEDFYPFLKDNREKIEKILTFRIPYYVGPLARGNSRFAWMTRKSEETITPWNF | |
| | EEVVDKGASAQSFIERMTNFDKNLPNEKVLPKHSLLYEYFTVYNELTKVKYVTEGMRKPAFLSGEQKK | |
| | AIVDLLFKTNRKVTVKQLKEDYFKKIECFDSVEISGVEDRFNASLGTYHDLLKIIKDKDFLDNEENED | |
| | ILEDIVLTLTLFEDREMIEERLKTYAHLFDDKVMKQLKRRRYTGWGRLSRKLINGIRDKQSGKTILDF | |
| | LKSDGFANRNFMQLIHDDSLTFKEDIQKAQVSGQGDSLHEHIANLAGSPAIKKGILQTVKVVDELVKV | |
| | MGRHKPENIVIEMARENQTTQKGQKNSRERMKRIEEGIKELGSQILKEHPVENTQLQNEKLYLYYLQN | |
| | GRDMYVDQELDINRLSDYDVDHIVPQSFLKDDSIDNKVLTRSDKNRGKSDNVPSEEVVKKMKNYWRQL | |
| | LNAKLITQRKFDNLTKAERGGLSELDKAGFIKRQLVETRQITKHVAQILDSRMNTKYDENDKLIREVK | |
| | VITLKSKLVSDFRKDFQFYKVREINNYHHAHDAYLNAVVGTALIKKYPKLESEFVYGDYKVYDVRKMI | |
| | AKSEQEIGKATAKYFFYSNIMNFFKTEITLANGEIRKRPLIETNGETGEIVWDKGRDFATVRKVLSMP | |
| | QVNIVKKTEVQTGGFSKESILPKRNSDKLIARKKDWDPKKYGGFVSPTVAYSVLVVAKVEKGKSKKLK | |
| | SVKELLGITIMERSSFEKNPIDFLEAKGYKEVKKDLIIKLPKYSLFELENGRKRMLASARELQKGNEL | |
| | ALPSKYVNFLYLASHYEKLKGSPEDNEQKQLFVEQHKHYLDEIIEQISEFSKRVILADANLDKVLSAY | |
| | NKHRDKPIREQAENIIHLFTLTNLGAPAAFKYFDTTIDRKQYRSTKEVLDATLIHQSITGLYETRIDL | |
| | SQLGGDSGGSKRTADGSEFEPKKKRKV | |
| ABE8-NG-CP1041 | NLS, wtTadA, linker, TadA*, NRCH | 465 |
| editor | Amino Acid Sequence | |
| | MKRTADGSEFESPKKKRKVSEVEFSHEYWMRHALTLAKRAWDEREVPVGAVLVHNNRVIGEGWNRPIG | |
| | RHDPTAHAEIMALRQGGLVMQNYRLIDATLYVTLEPCVMCAGAMIHSRIGRVVFGARDAKTGAAGSLM | |
| | DVLHHPGMNHRVEITEGILADECAALLSDFFRMRRQEIKAQKKAQSSTDSGGSSGGSSGSETPGTSES | |
| | ATPESSGGSSGGSGTTGATGGAGCTCTGGGCCTTCTTCTGAGCATTGAACACCTGTCTAGGCATCCGA | |
| | TAGAAATCGCACAGCAGGGCGGCACATTCATCTGCCAGGATTCCCTCGGTAATTTCGACGCGGTGATT | |
| | CATGCCGGGGTAGTTCAGCACGTTCATCAGGGAGCCTGCGGCGCCTCTTTTTGAGTTCCTCACGCCAA | |
| | ACACCACGCGGCCGATCCTAGAGTGGATCATGGCGCCGGCGCACATCACGCAAGGCTCGAATGTCACG | |
| | TACAGGGTGGCGTCAATCAGTCTGTAGTTCTGCATGACCAGGCCGCCCTGTCTCAGGGCCATAATTTC | |
| | GGCATGGGCTGTTGGGTCGTGCAGGCCGATGGCTCTGTTCCAGCCCTCGCCGATCACTCTATTGTTCA | |
| | GCACCAGCACGGCTCCCACAGGCACCTCCCTCTCATCCCGTGCCCTCTTGGCCAGGGTCAGGGCATGT | |
| | CTCATCCAGTACTCGTGGGAAAACTCCACCTCAGASGGSSGGSSGSETPGTSESATPESSGGSSGGSN | |
| | IMNFFKTEITLANGEIRKRPLIETNGETGEIVWDKGRDFATVRKVLSMPQVNIVKKTEVQTGGFSKES | |
| | IRPKRNSDKLIARKKDWDPKKYGGFVSPTVAYSVLVVAKVEKGKSKKLKSVKELLGITIMERSSFEKN | |
| | PIDFLEAKGYKEVKKDLIIKLPKYSLFELENGRKRMLASARFLQKGNELALPSKYVNFLYLASHYEKL | |
| | KGSPEDNEQKQLFVEQHKHYLDEIIEQISEFSKRVILADANLDKVLSAYNKHRDKPIREQAENIIHLF | |
| | TLTNLGAPRAFKYFDTTIDRKVYRSTKEVLDATLIHQSITGLYETRIDLSQLGGDGGSGGSGGSGGSG | |
| | GSGGSGGDKKYSIGLAIGTNSVGWAVITDEYKVPSKKFKVLGNTDRHSIKKNLIGALLFDSGETAEAT | |
| | RLKRTARRRYTRRKNRICYLQEIFSNEMAKVDDSFFHRLEESFLVEEDKKHERHPIFGNIVDEVAYHE | |
| | KYPTIYHLRKKLVDSTDKADLRLIYLALAHMIKFRGHFLIEGDLNPDNSDVDKLFIQLVQTYNQLFEE | |
| | NPINASGVDAKAILSARLSKSRRLENLIAQLPGEKKNGLFGNLIALSLGLTPNFKSNFDLAEDAKLQL | |
| | SKDTYDDDLDNLLAQIGDQYADLFLAAKNLSDAILLSDILRVNTEITKAPLSASMIKRYDEHHQDLTL | |
| | LKALVRQQLPEKYKEIFFDQSKNGYAGYIDGGASQEEFYKFIKPILEKMDGTEELLVKLNREDLLRKQ | |
| | RTFDNGSIPHQIHLGELHAILRRQEDFYPFLKDNREKIEKILTFRIPYYVGPLARGNSRFAWMTRKSE | |
| | ETITPWNFEEVVDKGASAQSFIERMTNFDKNLPNEKVLPKHSLLYEYFTVYNELTKVKYVTEGMRKPA | |
| | FLSGEQKKAIVDLLFKTNRKVTVKQLKEDYFKKIECFDSVEISGVEDRFNASLGTYHDLLKIIKDKDF | |
| | LDNEENEDILEDIVLTLTLFEDREMIEERLKTYAHLFDDKVMKQLKRRRYTGWGRLSRKLINGIRDKQ | |
| | SGKTILDFLKSDGFANRNFMQLIHDDSLTFKEDIQKAQVSGQGDSLHEHIANLAGSPAIKKGILQTVK | |
| | VVDELVKVMGRHKPENIVIEMARENQTTQKGQKNSRERMKRIEEGIKELGSQILKEHPVENTQLQNEK | |
| | LYLYYLQNGRDMYVDQELDINRLSDYDVDHIVPQSFLKDDSIDNKVLTRSDKNRGKSDNVPSEEVVKK | |
| | MKNYWRQLLNAKLITQRKFDNLTKAERGGLSELDKAGFIKRQLVETRQITKHVAQILDSRMNTKYDEN | |
| | DKLIREVKVITLKSKLVSDFRKDFQFYKVREINNYHHAHDAYLNAWGTALIKKYPKLESEFVYGDYK | |
| | VYDVRKMIAKSEQEIGKATAKYFFYSSGGSKRTADGSEFEPKKKRKV | |
| ABE-SpyMac | NLS, wtTadA, linker, TadA*, NRCH | 476 |
| editor | Amino Acid Sequence | |
| | MKRTADGSEFESPKKKRKVSEVEFSHEYWMRHALTLAKRAWDEREVPVGAVLVHNNRVIGEGWNRPIG | |
| | RHDPTAHAEIMALRQGGLVMQNYRLIDATLYVTLEPCVMCAGAMIHSRIGRVVFGARDAKTGAAGSLM | |
| | DVLHHPGMNHRVEITEGILADECAALLSDFFRMRRQEIKAQKKAQSSTDSGGSSGGSSGSETPGTSES | |
| | ATPESSGGSSGGSGTTGATGGAGCTCTGGGCCTTCTTCTGAGCATTGAACACCTGTCTAGGCATCCGA | |
| | TAGAAATCGCACAGCAGGGCGGCACATTCATCTGCCAGGATTCCCTCGGTAATTTCGACGCGGTGATT | |
| | CATGCCGGGGTAGTTCAGCACGTTCATCAGGGAGCCTGCGGCGCCTCTTTTTGAGTTCCTCACGCCAA | |
| | ACACCACGCGGCCGATCCTAGAGTGGATCATGGCGCCGGCGCACATCACGCAAGGCTCGAATGTCACG | |
| | TACAGGGTGGCGTCAATCAGTCTGTAGTTCTGCATGACCAGGCCGCCCTGTCTCAGGGCCATAATTTC | |
| | GGCATGGGCTGTTGGGTCGTGCAGGCCGATGGCTCTGTTCCAGCCCTCGCCGATCACTCTATTGTTCA | |
| | GCACCAGCACGGCTCCCACAGGCACCTCCCTCTCATCCCGTGCCCTCTTGGCCAGGGTCAGGGCATGT | |
| | CTCATCCAGTACTCGTGGGAAAACTCCACCTCAGASGGSSGGSSGSETPGTSESATPESSGGSSGGSD | |
| | KKYSIGLDIGTNSVGWAVITDEYKVPSKKFKVLGNTDRHSIKKNLIGALLFDSGETAEATRLKRTARR | |
| | RYTRRKNRICYLQEIFSNEMAKVDDSFFHRLEESFLVEEDKKHERHPIFGNIVDEVAYHEKYPTIYHL | |
| | RKKLVDSTDKADLRLIYLALAHMIKFRGHFLIEGDLNPDNSDVDKLFIQLVQTYNQLFEENPINASGV | |
| | DAKAILSARLSKSRRLENLIAQLPGEKKNGLFGNLIALSLGLTPNFKSNFDLAEDAKLQLSKDTYDDD | |
| | LDNLLAQIGDQYADLFLAAKNLSDAILLSDILRVNTEITKAPLSASMIKRYDEHHQDLTLLKALVRQQ | |
| | LPEKYKEIFFDQSKNGYAGYIDGGASQEEFYKFIKPILEKMDGTEELLVKLNREDLLRKQRTFDNGSI | |
| | PHQIHLGELHAILRRQEDFYPFLKDNREKIEKILTFRIPYYVGPLARGNSRFAWMTRKSEETITPWNF | |
| | EEVVDKGASAQSFIERMTNFDKNLPNEKVLPKHSLLYEYFTVYNELTKVKYVTEGMRKPAFLSGEQKK | |
| | AIVDLLFKTNRKVTVKQLKEDYFKKIECFDSVEISGVEDRFNASLGTYHDLLKIIKDKDFLDNEENED | |
| | ILEDIVLTLTLFEDREMIEERLKTYAHLFDDKVMKQLKRRRYTGWGRLSRKLINGIRDKQSGKTILDF | |
| | LKSDGFANRNFMQLIHDDSLTFKEDIQKAQVSGQGDSLHEHIANLAGSPAIKKGILQTVKVVDELVKV | |
| | MGRHKPENIVIEMARENQTTQKGQKNSRERMKRIEEGIKELGSQILKEHPVENTQLQNEKLYLYYLQN | |
| | GRDMYVDQELDINRLSDYDVDHIVPQSFLKDDSIDNKVLTRSDKNRGKSDNVPSEEVVKKMKNYWRQL | |
| | LNAKLITQRKFDNLTKAERGGLSELDKAGFIKRQLVETRQITKHVAQILDSRMNTKYDENDKLIREVK | |
| | VITLKSKLVSDFRKDFQFYKVREINNYHHAHDAYLNAVVGTALIKKYPKLESEFVYGDYKVYDVRKMI | |
| | AKSEQEIGKATAKYFFYSNIMNFFKTEITLANGEIRKRPLIETNGETGEIVWDKGRDFATVRKVLSMP | |
| | QVNIVKKTESGGSKRTADGSEFEPKKKRKV | |

CBEs (cytosine base editors)

| | | SEQ ID |
|---|---|---|
| DESCRIPTION | SEQUENCE | NO: |
| BE4max | MKRTADGSEFESPKKKRKVSSETGPVAVDPTLRRRIEPHEFEVFFDPRELRKETCLLYEINWGGRHSI | 223 |
| | WRHTSQNTNKHVEVNFIEKFTTERYFCPNTRCSITWFLSWSPCGECSRAITEFLSRYPHVTLFIYIAR | |
| | LYHHADPRNRQGLRDLISSGVTIQIMTEQESGYCWRNFVNYSPSNEAHWPRYPHLWVRLYVLELYCII | |
| | LGLPPCLNILRRKQPQLTFFTIALQSCHYQRLPPHILWATGLKSGGSSGGSSGSETPGTSESATPESS | |
| | GGSSGGSDKKYSIGLAIGTNSVGWAVITDEYKVPSKKFKVLGNTDRHSIKKNLIGALLFDSGETAEAT | |
| | RLKRTARRRYTRRKNRICYLQEIFSNEMAKVDDSFFHRLEESFLVEEDKKHERHPIFGNIVDEVAYHE | |
| | KYPTIYHLRKKLVDSTDKADLRLIYLALAHMIKFRGHFLIEGDLNPDNSDVDKLFIQLVQTYNQLFEE | |
| | NPINASGVDAKAILSARLSKSRRLENLIAQLPGEKKNGLFGNLIALSLGLTPNFKSNFDLAEDAKLQL | |
| | SKDTYDDDLDNLLAQIGDQYADLFLAAKNLSDAILLSDILRVNTEITKAPLSASMIKRYDEHHQDLTL | |
| | LKALVRQQLPEKYKEIFFDQSKNGYAGYIDGGASQEEFYKFIKPILEKMDGTEELLVKLNREDLLRKQ | |
| | RTFDNGSIPHQIHLGELHAILRRQEDFYPFLKDNREKIEKILTFRIPYYVGPLARGNSRFAWMTRKSE | |
| | ETITPWNFEEVVDKGASAQSFIERMTNFDKNLPNEKVLPKHSLLYEYFTVYNELTKVKYVTEGMRKPA | |
| | FLSGEQKKAIVDLLFKTNRKVTVKQLKEDYFKKIECFDSVEISGVEDRFNASLGTYHDLLKIIKDKDF | |
| | LDNEENEDILEDIVLTLTLFEDREMIEERLKTYAHLFDDKVMKQLKRRRYTGWGRLSRKLINGIRDKQ | |
| | SGKTILDFLKSDGFANRNFMQLIHDDSLTFKEDIQKAQVSGQGDSLHEHIANLAGSPAIKKGILQTVK | |
| | VVDELVKVMGRHKPENIVIEMARENQTTQKGQKNSRERMKRIEEGIKELGSQILKEHPVENTQLQNEK | |
| | LYLYYLQNGRDMYVDQELDINRLSDYDVDHIVPQSFLKDDSIDNKVLTRSDKNRGKSDNVPSEEVVKK | |
| | MKNYWRQLLNAKLITQRKFDNLTKAERGGLSELDKAGFIKRQLVETRQITKHVAQILDSRMNTKYDEN | |
| | DKLIREVKVITLKSKLVSDFRKDFQFYKVREINNYHHAHDAYLNAVVGTALIKKYPKLESEFVYGDYK | |
| | VYDVRKMIAKSEQEIGKATAKYFFYSNIMNFFKTEITLANGEIRKRPLIETNGETGEIVWDKGRDFAT | |
| | VRKVLSMPQVNIVKKTEVQTGGFSKESILPKRNSDKLIARKKDWDPKKYGGFDSPTVAYSVLVVAKVE | |
| | KGKSKKLKSVKELLGITIMERSSFEKNPIDFLEAKGYKEVKKDLIIKLPKYSLFELENGRKRMLASAG | |
| | ELQKGNELALPSKYVNFLYLASHYEKLKGSPEDNEQKQLFVEQHKHYLDEIIEQISEFSKRVILADAN | |
| | LDKVLSAYNKHRDKPIREQAENIIHLFTLTNLGAPAAFKYFDTTIDRKRYTSTKEVLDATLIHQSITG | |
| | LYETRIDLSQLGGDSGGSGGSGGSTNLSDIIEKETGKQLVIQESILMLPEEVEEVIGNKPESDILVHT | |
| | AYDESTDENVMLLTSDAPEYKPWALVIQDSNGENKIKMLSGGSGGSGGSTNLSDIIEKETGKQLVIQE | |
| | SILMLPEEVEEVIGNKPESDILVHTAYDESTDENVMLLTSDAPEYKPWALVIQDSNGENKIKMLSGGS | |
| | KRTADGSEFEPKKKRKV | |
| YE1-BE4 | MKRTADGSEFESPKKKRKVSSETGPVAVDPTLRRRIEPHEFEVFFDPRELRKETCLLYEINWGGRHSI | 224 |
| | WRHTSQNTNKHVEVNFIEKFTTERYFCPNTRCSITWFLSYSPCGECSRAITEFLSRYPHVTLFIYIAR | |
| | LYHHADPENRQGLRDLISSGVTIQIMTEQESGYCWRNFVNYSPSNEAHWPRYPHLWVRLYVLELYCII | |
| | LGLPPCLNILRRKQPQLTFFTIALQSCHYQRLPPHILWATGLKSGGSSGGSSGSETPGTSESATPESS | |
| | GGSSGGSDKKYSIGLAIGTNSVGWAVITDEYKVPSKKFKVLGNTDRHSIKKNLIGALLFDSGETAEAT | |
| | RLKRTARRRYTRRKNRICYLQEIFSNEMAKVDDSFFHRLEESFLVEEDKKHERHPIFGNIVDEVAYHE | |
| | KYPTIYHLRKKLVDSTDKADLRLIYLALAHMIKFRGHFLIEGDLNPDNSDVDKLFIQLVQTYNQLFEE | |
| | NPINASGVDAKAILSARLSKSRRLENLIAQLPGEKKNGLFGNLIALSLGLTPNFKSNFDLAEDAKLQL | |
| | SKDTYDDDLDNLLAQIGDQYADLFLAAKNLSDAILLSDILRVNTEITKAPLSASMIKRYDEHHQDLTL | |
| | LKALVRQQLPEKYKEIFFDQSKNGYAGYIDGGASQEEFYKFIKPILEKMDGTEELLVKLNREDLLRKQ | |
| | RTFDNGSIPHQIHLGELHAILRRQEDFYPFLKDNREKIEKILTFRIPYYVGPLARGNSRFAWMTRKSE | |
| | ETITPWNFEEVVDKGASAQSFIERMTNFDKNLPNEKVLPKHSLLYEYFTVYNELTKVKYVTEGMRKPA | |
| | FLSGEQKKAIVDLLFKTNRKVTVKQLKEDYFKKIECFDSVEISGVEDRFNASLGTYHDLLKIIKDKDF | |
| | LDNEENEDILEDIVLTLTLFEDREMIEERLKTYAHLFDDKVMKQLKRRRYTGWGRLSRKLINGIRDKQ | |
| | SGKTILDFLKSDGFANRNFMQLIHDDSLTFKEDIQKAQVSGQGDSLHEHIANLAGSPAIKKGILQTVK | |
| | VVDELVKVMGRHKPENIVIEMARENQTTQKGQKNSRERMKRIEEGIKELGSQILKEHPVENTQLQNEK | |
| | LYLYYLQNGRDMYVDQELDINRLSDYDVDHIVPQSFLKDDSIDNKVLTRSDKNRGKSDNVPSEEVVKK | |
| | MKNYWRQLLNAKLITQRKFDNLTKAERGGLSELDKAGFIKRQLVETRQITKHVAQILDSRMNTKYDEN | |
| | DKLIREVKVITLKSKLVSDFRKDFQFYKVREINNYHHAHDAYLNAVVGTALIKKYPKLESEFVYGDYK | |
| | VYDVRKMIAKSEQEIGKATAKYFFYSNIMNFFKTEITLANGEIRKRPLIETNGETGEIVWDKGRDFAT | |
| | VRKVLSMPQVNIVKKTEVQTGGFSKESILPKRNSDKLIARKKDWDPKKYGGFDSPTVAYSVLVVAKVE | |
| | KGKSKKLKSVKELLGITIMERSSFEKNPIDFLEAKGYKEVKKDLIIKLPKYSLFELENGRKRMLASAG | |
| | ELQKGNELALPSKYVNFLYLASHYEKLKGSPEDNEQKQLFVEQHKHYLDEIIEQISEFSKRVILADAN | |
| | LDKVLSAYNKHRDKPIREQAENIIHLFTLTNLGAPAAFKYFDTTIDRKRYTSTKEVLDATLIHQSITG | |
| | LYETRIDLSQLGGDSGGSGGSGGSTNLSDIIEKETGKQLVIQESILMLPEEVEEVIGNKPESDILVHT | |
| | AYDESTDENVMLLTSDAPEYKPWALVIQDSNGENKIKMLSGGSGGSGGSTNLSDIIEKETGKQLVIQE | |
| | SILMLPEEVEEVIGNKPESDILVHTAYDESTDENVMLLTSDAPEYKPWALVIQDSNGENKIKMLSGGS | |
| | KRTADGSEFEPKKKRKV | |
| YE2-BE4 | MKRTADGSEFESPKKKRKVSSETGPVAVDPTLRRRIEPHEFEVFFDPRELRKETCLLYEINWGGRHSI | 225 |
| | WRHTSQNTNKHVEVNFIEKFTTERYFCPNTRCSITWFLSYSPCGECSRAITEFLSRYPHVTLFIYIAR | |
| | LYHHADPRNRQGLEDLISSGVTIQIMTEQESGYCWRNFVNYSPSNEAHWPRYPHLWVRLYVLELYCII | |
| | LGLPPCLNILRRKQPQLTFFTIALQSCHYQRLPPHILWATGLKSGGSSGGSSGSETPGTSESATPESS | |
| | GGSSGGSDKKYSIGLAIGTNSVGWAVITDEYKVPSKKFKVLGNTDRHSIKKNLIGALLFDSGETAEAT | |
| | RLKRTARRRYTRRKNRICYLQEIFSNEMAKVDDSFFHRLEESFLVEEDKKHERHPIFGNIVDEVAYHE | |
| | KYPTIYHLRKKLVDSTDKADLRLIYLALAHMIKFRGHFLIEGDLNPDNSDVDKLFIQLVQTYNQLFEE | |
| | NPINASGVDAKAILSARLSKSRRLENLIAQLPGEKKNGLFGNLIALSLGLTPNFKSNFDLAEDAKLQL | |
| | SKDTYDDDLDNLLAQIGDQYADLFLAAKNLSDAILLSDILRVNTEITKAPLSASMIKRYDEHHQDLTL | |
| | LKALVRQQLPEKYKEIFFDQSKNGYAGYIDGGASQEEFYKFIKPILEKMDGTEELLVKLNREDLLRKQ | |
| | RTFDNGSIPHQIHLGELHAILRRQEDFYPFLKDNREKIEKILTFRIPYYVGPLARGNSRFAWMTRKSE | |
| | ETITPWNFEEVVDKGASAQSFIERMTNFDKNLPNEKVLPKHSLLYEYFTVYNELTKVKYVTEGMRKPA | |
| | FLSGEQKKAIVDLLFKTNRKVTVKQLKEDYFKKIECFDSVEISGVEDRFNASLGTYHDLLKIIKDKDF | |
| | LDNEENEDILEDIVLTLTLFEDREMIEERLKTYAHLFDDKVMKQLKRRRYTGWGRLSRKLINGIRDKQ | |
| | SGKTILDFLKSDGFANRNFMQLIHDDSLTFKEDIQKAQVSGQGDSLHEHIANLAGSPAIKKGILQTVK | |
| | VVDELVKVMGRHKPENIVIEMARENQTTQKGQKNSRERMKRIEEGIKELGSQILKEHPVENTQLQNEK | |
| | LYLYYLQNGRDMYVDQELDINRLSDYDVDHIVPQSFLKDDSIDNKVLTRSDKNRGKSDNVPSEEVVKK | |
| | MKNYWRQLLNAKLITQRKFDNLTKAERGGLSELDKAGFIKRQLVETRQITKHVAQILDSRMNTKYDEN | |
| | DKLIREVKVITLKSKLVSDFRKDFQFYKVREINNYHHAHDAYLNAVVGTALIKKYPKLESEFVYGDYK | |
| | VYDVRKMIAKSEQEIGKATAKYFFYSNIMNFFKTEITLANGEIRKRPLIETNGETGEIVWDKGRDFAT | |
| | VRKVLSMPQVNIVKKTEVQTGGFSKESILPKRNSDKLIARKKDWDPKKYGGFDSPTVAYSVLVVAKVE | |
| | KGKSKKLKSVKELLGITIMERSSFEKNPIDFLEAKGYKEVKKDLIIKLPKYSLFELENGRKRMLASAG | |
| | ELQKGNELALPSKYVNFLYLASHYEKLKGSPEDNEQKQLFVEQHKHYLDEIIEQISEFSKRVILADAN | |
| | LDKVLSAYNKHRDKPIREQAENIIHLFTLTNLGAPAAFKYFDTTIDRKRYTSTKEVLDATLIHQSITG | |
| | LYETRIDLSQLGGDSGGSGGSGGSTNLSDIIEKETGKQLVIQESILMLPEEVEEVIGNKPESDILVHT | |
| | AYDESTDENVMLLTSDAPEYKPWALVIQDSNGENKIKMLSGGSGGSGGSTNLSDIIEKETGKQLVIQE | |
| | SILMLPEEVEEVIGNKPESDILVHTAYDESTDENVMLLTSDAPEYKPWALVIQDSNGENKIKMLSGGS | |
| | KRTADGSEFEPKKKRKV | |
| YEE-BE4 | MKRTADGSEFESPKKKRKVSSETGPVAVDPTLRRRIEPHEFEVFFDPRELRKETCLLYEINWGGRHSI | 226 |
| | WRHTSQNTNKHVEVNFIEKFTTERYFCPNTRCSITWFLSYSPCGECSRAITEFLSRYPHVTLFIYIAR | |
| | LYHHADPENRQGLEDLISSGVTIQIMTEQESGYCWRNFVNYSPSNEAHWPRYPHLWVRLYVLELYCII | |
| | LGLPPCLNILRRKQPQLTFFTIALQSCHYQRLPPHILWATGLKSGGSSGGSSGSETPGTSESATPESS | |
| | GGSSGGSDKKYSIGLAIGTNSVGWAVITDEYKVPSKKFKVLGNTDRHSIKKNLIGALLFDSGETAEAT | |
| | RLKRTARRRYTRRKNRICYLQEIFSNEMAKVDDSFFHRLEESFLVEEDKKHERHPIFGNIVDEVAYHE | |
| | KYPTIYHLRKKLVDSTDKADLRLIYLALAHMIKFRGHFLIEGDLNPDNSDVDKLFIQLVQTYNQLFEE | |
| | NPINASGVDAKAILSARLSKSRRLENLIAQLPGEKKNGLFGNLIALSLGLTPNFKSNFDLAEDAKLQL | |
| | SKDTYDDDLDNLLAQIGDQYADLFLAAKNLSDAILLSDILRVNTEITKAPLSASMIKRYDEHHQDLTL | |
| | LKALVRQQLPEKYKEIFFDQSKNGYAGYIDGGASQEEFYKFIKPILEKMDGTEELLVKLNREDLLRKQ | |
| | RTFDNGSIPHQIHLGELHAILRRQEDFYPFLKDNREKIEKILTFRIPYYVGPLARGNSRFAWMTRKSE | |
| | ETITPWNFEEVVDKGASAQSFIERMTNFDKNLPNEKVLPKHSLLYEYFTVYNELTKVKYVTEGMRKPA | |
| | FLSGEQKKAIVDLLFKTNRKVTVKQLKEDYFKKIECFDSVEISGVEDRFNASLGTYHDLLKIIKDKDF | |
| | LDNEENEDILEDIVLTLTLFEDREMIEERLKTYAHLFDDKVMKQLKRRRYTGWGRLSRKLINGIRDKQ | |
| | SGKTILDFLKSDGFANRNFMQLIHDDSLTFKEDIQKAQVSGQGDSLHEHIANLAGSPAIKKGILQTVK | |
| | VVDELVKVMGRHKPENIVIEMARENQTTQKGQKNSRERMKRIEEGIKELGSQILKEHPVENTQLQNEK | |
| | LYLYYLQNGRDMYVDQELDINRLSDYDVDHIVPQSFLKDDSIDNKVLTRSDKNRGKSDNVPSEEVVKK | |
| | MKNYWRQLLNAKLITQRKFDNLTKAERGGLSELDKAGFIKRQLVETRQITKHVAQILDSRMNTKYDEN | |
| | DKLIREVKVITLKSKLVSDFRKDFQFYKVREINNYHHAHDAYLNAVVGTALIKKYPKLESEFVYGDYK | |
| | VYDVRKMIAKSEQEIGKATAKYFFYSNIMNFFKTEITLANGEIRKRPLIETNGETGEIVWDKGRDFAT | |
| | VRKVLSMPQVNIVKKTEVQTGGFSKESILPKRNSDKLIARKKDWDPKKYGGFDSPTVAYSVLVVAKVE | |
| | KGKSKKLKSVKELLGITIMERSSFEKNPIDFLEAKGYKEVKKDLIIKLPKYSLFELENGRKRMLASAG | |
| | ELQKGNELALPSKYVNFLYLASHYEKLKGSPEDNEQKQLFVEQHKHYLDEIIEQISEFSKRVILADAN | |
| | LDKVLSAYNKHRDKPIREQAENIIHLFTLTNLGAPAAFKYFDTTIDRKRYTSTKEVLDATLIHQSITG | |
| | LYETRIDLSQLGGDSGGSGGSGGSTNLSDIIEKETGKQLVIQESILMLPEEVEEVIGNKPESDILVHT | |
| | AYDESTDENVMLLTSDAPEYKPWALVIQDSNGENKIKMLSGGSGGSGGSTNLSDIIEKETGKQLVIQE | |
| | SILMLPEEVEEVIGNKPESDILVHTAYDESTDENVMLLTSDAPEYKPWALVIQDSNGENKIKMLSGGS | |
| | KRTADGSEFEPKKKRKV | |
| EE-BE4 | MKRTADGSEFESPKKKRKVSSETGPVAVDPTLRRRIEPHEFEVFFDPRELRKETCLLYEINWGGRHSI | 227 |
| | WRHTSQNTNKHVEVNFIEKFTTERYFCPNTRCSITWFLSWSPCGECSRAITEFLSRYPHVTLFIYIAR | |
| | LYHHADPENRQGLEDLISSGVTIQIMTEQESGYCWRNFVNYSPSNEAHWPRYPHLWVRLYVLELYCII | |
| | LGLPPCLNILRRKQPQLTFFTIALQSCHYQRLPPHILWATGLKSGGSSGGSSGSETPGTSESATPESS | |
| | GGSSGGSDKKYSIGLAIGTNSVGWAVITDEYKVPSKKFKVLGNTDRHSIKKNLIGALLFDSGETAEAT | |
| | RLKRTARRRYTRRKNRICYLQEIFSNEMAKVDDSFFHRLEESFLVEEDKKHERHPIFGNIVDEVAYHE | |
| | KYPTIYHLRKKLVDSTDKADLRLIYLALAHMIKFRGHFLIEGDLNPDNSDVDKLFIQLVQTYNQLFEE | |
| | NPINASGVDAKAILSARLSKSRRLENLIAQLPGEKKNGLFGNLIALSLGLTPNFKSNFDLAEDAKLQL | |
| | SKDTYDDDLDNLLAQIGDQYADLFLAAKNLSDAILLSDILRVNTEITKAPLSASMIKRYDEHHQDLTL | |
| | LKALVRQQLPEKYKEIFFDQSKNGYAGYIDGGASQEEFYKFIKPILEKMDGTEELLVKLNREDLLRKQ | |
| | RTFDNGSIPHQIHLGELHAILRRQEDFYPFLKDNREKIEKILTFRIPYYVGPLARGNSRFAWMTRKSE | |
| | ETITPWNFEEVVDKGASAQSFIERMTNFDKNLPNEKVLPKHSLLYEYFTVYNELTKVKYVTEGMRKPA | |
| | FLSGEQKKAIVDLLFKTNRKVTVKQLKEDYFKKIECFDSVEISGVEDRFNASLGTYHDLLKIIKDKDF | |
| | LDNEENEDILEDIVLTLTLFEDREMIEERLKTYAHLFDDKVMKQLKRRRYTGWGRLSRKLINGIRDKQ | |
| | SGKTILDFLKSDGFANRNFMQLIHDDSLTFKEDIQKAQVSGQGDSLHEHIANLAGSPAIKKGILQTVK | |
| | VVDELVKVMGRHKPENIVIEMARENQTTQKGQKNSRERMKRIEEGIKELGSQILKEHPVENTQLQNEK | |
| | LYLYYLQNGRDMYVDQELDINRLSDYDVDHIVPQSFLKDDSIDNKVLTRSDKNRGKSDNVPSEEVVKK | |
| | MKNYWRQLLNAKLITQRKFDNLTKAERGGLSELDKAGFIKRQLVETRQITKHVAQILDSRMNTKYDEN | |
| | DKLIREVKVITLKSKLVSDFRKDFQFYKVREINNYHHAHDAYLNAVVGTALIKKYPKLESEFVYGDYK | |
| | VYDVRKMIAKSEQEIGKATAKYFFYSNIMNFFKTEITLANGEIRKRPLIETNGETGEIVWDKGRDFAT | |
| | VRKVLSMPQVNIVKKTEVQTGGFSKESILPKRNSDKLIARKKDWDPKKYGGFDSPTVAYSVLVVAKVE | |
| | KGKSKKLKSVKELLGITIMERSSFEKNPIDFLEAKGYKEVKKDLIIKLPKYSLFELENGRKRMLASAG | |
| | ELQKGNELALPSKYVNFLYLASHYEKLKGSPEDNEQKQLFVEQHKHYLDEIIEQISEFSKRVILADAN | |
| | LDKVLSAYNKHRDKPIREQAENIIHLFTLTNLGAPAAFKYFDTTIDRKRYTSTKEVLDATLIHQSITG | |
| | LYETRIDLSQLGGDSGGSGGSGGSTNLSDIIEKETGKQLVIQESILMLPEEVEEVIGNKPESDILVHT | |
| | AYDESTDENVMLLTSDAPEYKPWALVIQDSNGENKIKMLSGGSGGSGGSTNLSDIIEKETGKQLVIQE | |
| | SILMLPEEVEEVIGNKPESDILVHTAYDESTDENVMLLTSDAPEYKPWALVIQDSNGENKIKMLSGGS | |
| | KRTADGSEFEPKKKRKV | |
| R33A-BE4 | MKRTADGSEFESPKKKRKVSSETGPVAVDPTLRRRIEPHEFEVFFDPRELAKETCLLYEINWGGRHSI | 228 |
| | WRHTSQNTNKHVEVNFIEKFTTERYFCPNTRCSITWFLSWSPCGECSRAITEFLSRYPHVTLFIYIAR | |
| | LYHHADPRNRQGLRDLISSGVTIQIMTEQESGYCWRNFVNYSPSNEAHWPRYPHLWVRLYVLELYCII | |
| | LGLPPCLNILRRKQPQLTFFTIALQSCHYQRLPPHILWATGLKSGGSSGGSSGSETPGTSESATPESS | |
| | GGSSGGSDKKYSIGLAIGTNSVGWAVITDEYKVPSKKFKVLGNTDRHSIKKNLIGALLFDSGETAEAT | |
| | RLKRTARRRYTRRKNRICYLQEIFSNEMAKVDDSFFHRLEESFLVEEDKKHERHPIFGNIVDEVAYHE | |
| | KYPTIYHLRKKLVDSTDKADLRLIYLALAHMIKFRGHFLIEGDLNPDNSDVDKLFIQLVQTYNQLFEE | |
| | NPINASGVDAKAILSARLSKSRRLENLIAQLPGEKKNGLFGNLIALSLGLTPNFKSNFDLAEDAKLQL | |
| | SKDTYDDDLDNLLAQIGDQYADLFLAAKNLSDAILLSDILRVNTEITKAPLSASMIKRYDEHHQDLTL | |
| | LKALVRQQLPEKYKEIFFDQSKNGYAGYIDGGASQEEFYKFIKPILEKMDGTEELLVKLNREDLLRKQ | |
| | RTFDNGSIPHQIHLGELHAILRRQEDFYPFLKDNREKIEKILTFRIPYYVGPLARGNSRFAWMTRKSE | |
| | ETITPWNFEEVVDKGASAQSFIERMTNFDKNLPNEKVLPKHSLLYEYFTVYNELTKVKYVTEGMRKPA | |
| | FLSGEQKKAIVDLLFKTNRKVTVKQLKEDYFKKIECFDSVEISGVEDRFNASLGTYHDLLKIIKDKDF | |
| | LDNEENEDILEDIVLTLTLFEDREMIEERLKTYAHLFDDKVMKQLKRRRYTGWGRLSRKLINGIRDKQ | |
| | SGKTILDFLKSDGFANRNFMQLIHDDSLTFKEDIQKAQVSGQGDSLHEHIANLAGSPAIKKGILQTVK | |
| | VVDELVKVMGRHKPENIVIEMARENQTTQKGQKNSRERMKRIEEGIKELGSQILKEHPVENTQLQNEK | |
| | LYLYYLQNGRDMYVDQELDINRLSDYDVDHIVPQSFLKDDSIDNKVLTRSDKNRGKSDNVPSEEVVKK | |
| | MKNYWRQLLNAKLITQRKFDNLTKAERGGLSELDKAGFIKRQLVETRQITKHVAQILDSRMNTKYDEN | |
| | DKLIREVKVITLKSKLVSDFRKDFQFYKVREINNYHHAHDAYLNAVVGTALIKKYPKLESEFVYGDYK | |
| | VYDVRKMIAKSEQEIGKATAKYFFYSNIMNFFKTEITLANGEIRKRPLIETNGETGEIVWDKGRDFAT | |
| | VRKVLSMPQVNIVKKTEVQTGGFSKESILPKRNSDKLIARKKDWDPKKYGGFDSPTVAYSVLVVAKVE | |
| | KGKSKKLKSVKELLGITIMERSSFEKNPIDFLEAKGYKEVKKDLIIKLPKYSLFELENGRKRMLASAG | |
| | ELQKGNELALPSKYVNFLYLASHYEKLKGSPEDNEQKQLFVEQHKHYLDEIIEQISEFSKRVILADAN | |
| | LDKVLSAYNKHRDKPIREQAENIIHLFTLTNLGAPAAFKYFDTTIDRKRYTSTKEVLDATLIHQSITG | |
| | LYETRIDLSQLGGDSGGSGGSGGSTNLSDIIEKETGKQLVIQESILMLPEEVEEVIGNKPESDILVHT | |
| | AYDESTDENVMLLTSDAPEYKPWALVIQDSNGENKIKMLSGGSGGSGGSTNLSDIIEKETGKQLVIQE | |
| | SILMLPEEVEEVIGNKPESDILVHTAYDESTDENVMLLTSDAPEYKPWALVIQDSNGENKIKMLSGGS | |
| | KRTADGSEFEPKKKRKV | |
| R33A + K34A-BE4 | MKRTADGSEFESPKKKRKVSSETGPVAVDPTLRRRIEPHEFEVFFDPRELAAETCLLYEINWGGRHSI | 229 |
| | WRHTSQNTNKHVEVNFIEKFTTERYFCPNTRCSITWFLSWSPCGECSRAITEFLSRYPHVTLFIYIAR | |
| | LYHHADPRNRQGLRDLISSGVTIQIMTEQESGYCWRNFVNYSPSNEAHWPRYPHLWVRLYVLELYCII | |
| | LGLPPCLNILRRKQPQLTFFTIALQSCHYQRLPPHILWATGLKSGGSSGGSSGSETPGTSESATPESS | |
| | GGSSGGSDKKYSIGLAIGTNSVGWAVITDEYKVPSKKFKVLGNTDRHSIKKNLIGALLFDSGETAEAT | |
| | RLKRTARRRYTRRKNRICYLQEIFSNEMAKVDDSFFHRLEESFLVEEDKKHERHPIFGNIVDEVAYHE | |
| | KYPTIYHLRKKLVDSTDKADLRLIYLALAHMIKFRGHFLIEGDLNPDNSDVDKLFIQLVQTYNQLFEE | |
| | NPINASGVDAKAILSARLSKSRRLENLIAQLPGEKKNGLFGNLIALSLGLTPNFKSNFDLAEDAKLQL | |
| | SKDTYDDDLDNLLAQIGDQYADLFLAAKNLSDAILLSDILRVNTEITKAPLSASMIKRYDEHHQDLTL | |
| | LKALVRQQLPEKYKEIFFDQSKNGYAGYIDGGASQEEFYKFIKPILEKMDGTEELLVKLNREDLLRKQ | |
| | RTFDNGSIPHQIHLGELHAILRRQEDFYPFLKDNREKIEKILTFRIPYYVGPLARGNSRFAWMTRKSE | |
| | ETITPWNFEEVVDKGASAQSFIERMTNFDKNLPNEKVLPKHSLLYEYFTVYNELTKVKYVTEGMRKPA | |
| | FLSGEQKKAIVDLLFKTNRKVTVKQLKEDYFKKIECFDSVEISGVEDRFNASLGTYHDLLKIIKDKDF | |
| | LDNEENEDILEDIVLTLTLFEDREMIEERLKTYAHLFDDKVMKQLKRRRYTGWGRLSRKLINGIRDKQ | |
| | SGKTILDFLKSDGFANRNFMQLIHDDSLTFKEDIQKAQVSGQGDSLHEHIANLAGSPAIKKGILQTVK | |
| | VVDELVKVMGRHKPENIVIEMARENQTTQKGQKNSRERMKRIEEGIKELGSQILKEHPVENTQLQNEK | |
| | LYLYYLQNGRDMYVDQELDINRLSDYDVDHIVPQSFLKDDSIDNKVLTRSDKNRGKSDNVPSEEVVKK | |
| | MKNYWRQLLNAKLITQRKFDNLTKAERGGLSELDKAGFIKRQLVETRQITKHVAQILDSRMNTKYDEN | |
| | DKLIREVKVITLKSKLVSDFRKDFQFYKVREINNYHHAHDAYLNAVVGTALIKKYPKLESEFVYGDYK | |
| | VYDVRKMIAKSEQEIGKATAKYFFYSNIMNFFKTEITLANGEIRKRPLIETNGETGEIVWDKGRDFAT | |
| | VRKVLSMPQVNIVKKTEVQTGGFSKESILPKRNSDKLIARKKDWDPKKYGGFDSPTVAYSVLVVAKVE | |
| | KGKSKKLKSVKELLGITIMERSSFEKNPIDFLEAKGYKEVKKDLIIKLPKYSLFELENGRKRMLASAG | |
| | ELQKGNELALPSKYVNFLYLASHYEKLKGSPEDNEQKQLFVEQHKHYLDEIIEQISEFSKRVILADAN | |
| | LDKVLSAYNKHRDKPIREQAENIIHLFTLTNLGAPAAFKYFDTTIDRKRYTSTKEVLDATLIHQSITG | |
| | LYETRIDLSQLGGDSGGSGGSGGSTNLSDIIEKETGKQLVIQESILMLPEEVEEVIGNKPESDILVHT | |
| | AYDESTDENVMLLTSDAPEYKPWALVIQDSNGENKIKMLSGGSGGSGGSTNLSDIIEKETGKQLVIQE | |
| | SILMLPEEVEEVIGNKPESDILVHTAYDESTDENVMLLTSDAPEYKPWALVIQDSNGENKIKMLSGGS | |
| | KRTADGSEFEPKKKRKV | |
| APOBEC3A | MKRTADGSEFESPKKKRKVSEASPASGPRHLMDPHIFTSNFNNGIGRHKTYLCYEVERLDNGTSVKMD | 230 |
| (A3A)-BE4 | QHRGFLHNQAKNLLCGFYGRHAELRFLDLVPSLQLDPAQIYRVTWFISWSPCFSWGCAGEVRAFLQEN | |
| | THVRLRIFAARIYDYDPLYKEALQMLRDAGAQVSIMTYDEFKHCWDTFVDHQGCPFQPWDGLDEHSQA | |
| | LSGRLRAILQNQGNSGGSSGGSSGSETPGTSESATPESSGGSSGGSDKKYSIGLAIGTNSVGWAVITD | |
| | EYKVPSKKFKVLGNTDRHSIKKNLIGALLFDSGETAEATRLKRTARRRYTRRKNRICYLQEIFSNEMA | |
| | KVDDSFFHRLEESFLVEEDKKHERHPIFGNIVDEVAYHEKYPTIYHLRKKLVDSTDKADLRLIYLALA | |
| | HMIKFRGHFLIEGDLNPDNSDVDKLFIQLVQTYNQLFEENPINASGVDAKAILSARLSKSRRLENLIA | |
| | QLPGEKKNGLFGNLIALSLGLTPNFKSNFDLAEDAKLQLSKDTYDDDLDNLLAQIGDQYADLFLAAKN | |
| | LSDAILLSDILRVNTEITKAPLSASMIKRYDEHHQDLTLLKALVRQQLPEKYKEIFFDQSKNGYAGYI | |
| | DGGASQEEFYKFIKPILEKMDGTEELLVKLNREDLLRKQRTFDNGSIPHQIHLGELHAILRRQEDFYP | |
| | FLKDNREKIEKILTFRIPYYVGPLARGNSRFAWMTRKSEETITPWNFEEVVDKGASAQSFIERMTNFD | |
| | KNLPNEKVLPKHSLLYEYFTVYNELTKVKYVTEGMRKPAFLSGEQKKAIVDLLFKTNRKVTVKQLKED | |
| | YFKKIECFDSVEISGVEDRFNASLGTYHDLLKIIKDKDFLDNEENEDILEDIVLTLTLFEDREMIEER | |
| | LKTYAHLFDDKVMKQLKRRRYTGWGRLSRKLINGIRDKQSGKTILDFLKSDGFANRNFMQLIHDDSLT | |
| | FKEDIQKAQVSGQGDSLHEHIANLAGSPAIKKGILQTVKVVDELVKVMGRHKPENIVIEMARENQTTQ | |
| | KGQKNSRERMKRIEEGIKELGSQILKEHPVENTQLQNEKLYLYYLQNGRDMYVDQELDINRLSDYDVD | |
| | HIVPQSFLKDDSIDNKVLTRSDKNRGKSDNVPSEEVVKKMKNYWRQLLNAKLITQRKFDNLTKAERGG | |
| | LSELDKAGFIKRQLVETRQITKHVAQILDSRMNTKYDENDKLIREVKVITLKSKLVSDFRKDFQFYKV | |
| | REINNYHHAHDAYLNAVVGTALIKKYPKLESEFVYGDYKVYDVRKMIAKSEQEIGKATAKYFFYSNIM | |
| | NFFKTEITLANGEIRKRPLIETNGETGEIVWDKGRDFATVRKVLSMPQVNIVKKTEVQTGGFSKESIL | |
| | PKRNSDKLIARKKDWDPKKYGGFDSPTVAYSVLVVAKVEKGKSKKLKSVKELLGITIMERSSFEKNPI | |
| | DFLEAKGYKEVKKDLIIKLPKYSLFELENGRKRMLASAGELQKGNELALPSKYVNFLYLASHYEKLKG | |
| | SPEDNEQKQLFVEQHKHYLDEIIEQISEFSKRVILADANLDKVLSAYNKHRDKPIREQAENIIHLFTL | |
| | TNLGAPAAFKYFDTTIDRKRYTSTKEVLDATLIHQSITGLYETRIDLSQLGGDSGGSGGSGGSTNLSD | |
| | IIEKETGKQLVIQESILMLPEEVEEVIGNKPESDILVHTAYDESTDENVMLLTSDAPEYKPWALVIQD | |
| | SNGENKIKMLSGGSGGSGGSTNLSDIIEKETGKQLVIQESILMLPEEVEEVIGNKPESDILVHTAYDE | |
| | STDENVMLLTSDAPEYKPWALVIQDSNGENKIKMLSGGSKRTADGSEFEPKKKRKV | |
| APOBEC3B | MKRTADGSEFESPKKKRKVNPQIRNPMERMYRDTFYDNFENEPILYGRSYTWLCYEVKIKRGRSNLLW | 231 |
| (A3B)-BE4 | DTGVFRGQVYFKPQYHAEMCFLSWFCGNQLPAYKCFQITWFVSWTPCPDCVAKLAEFLSEHPNVTLTI | |
| | SAARLYYYWERDYRRALCRLSQAGARVTIMDYEEFAYCWENFVYNEGQQFMPWYKFDENYAFLHRTLK | |
| | EILRYLMDPDTFTFNFNNDPLVLRRRQTYLCYEVERLDNGTWVLMDQHMGFLCNEAKNLLCGFYGRHA | |
| | ELRFLDLVPSLQLDPAQIYRVTWFISWSPCFSWGCAGEVRAFLQENTHVRLRIFAARIYDYDPLYKEA | |
| | LQMLRDAGAQVSIMTYDEFEYCWDTFVYRQGCPFQPWDGLEEHSQALSGRLRAILQNQGNSGGSSGGS | |
| | SGSETPGTSESATPESSGGSSGGSDKKYSIGLAIGTNSVGWAVITDEYKVPSKKFKVLGNTDRHSIKK | |
| | NLIGALLFDSGETAEATRLKRTARRRYTRRKNRICYLQEIFSNEMAKVDDSFFHRLEESFLVEEDKKH | |
| | ERHPIFGNIVDEVAYHEKYPTIYHLRKKLVDSTDKADLRLIYLALAHMIKFRGHFLIEGDLNPDNSDV | |
| | DKLFIQLVQTYNQLFEENPINASGVDAKAILSARLSKSRRLENLIAQLPGEKKNGLFGNLIALSLGLT | |
| | PNFKSNFDLAEDAKLQLSKDTYDDDLDNLLAQIGDQYADLFLAAKNLSDAILLSDILRVNTEITKAPL | |
| | SASMIKRYDEHHQDLTLLKALVRQQLPEKYKEIFFDQSKNGYAGYIDGGASQEEFYKFIKPILEKMDG | |
| | TEELLVKLNREDLLRKQRTFDNGSIPHQIHLGELHAILRRQEDFYPFLKDNREKIEKILTFRIPYYVG | |
| | PLARGNSRFAWMTRKSEETITPWNFEEVVDKGASAQSFIERMTNFDKNLPNEKVLPKHSLLYEYFTVY | |
| | NELTKVKYVTEGMRKPAFLSGEQKKAIVDLLFKTNRKVTVKQLKEDYFKKIECFDSVEISGVEDRFNA | |
| | SLGTYHDLLKIIKDKDFLDNEENEDILEDIVLTLTLFEDREMIEERLKTYAHLFDDKVMKQLKRRRYT | |
| | GWGRLSRKLINGIRDKQSGKTILDFLKSDGFANRNFMQLIHDDSLTFKEDIQKAQVSGQGDSLHEHIA | |
| | NLAGSPAIKKGILQTVKVVDELVKVMGRHKPENIVIEMARENQTTQKGQKNSRERMKRIEEGIKELGS | |
| | QILKEHPVENTQLQNEKLYLYYLQNGRDMYVDQELDINRLSDYDVDHIVPQSFLKDDSIDNKVLTRSD | |
| | KNRGKSDNVPSEEVVKKMKNYWRQLLNAKLITQRKFDNLTKAERGGLSELDKAGFIKRQLVETRQITK | |
| | HVAQILDSRMNTKYDENDKLIREVKVITLKSKLVSDFRKDFQFYKVREINNYHHAHDAYLNAVVGTAL | |
| | IKKYPKLESEFVYGDYKVYDVRKMIAKSEQEIGKATAKYFFYSNIMNFFKTEITLANGEIRKRPLIET | |
| | NGETGEIVWDKGRDFATVRKVLSMPQVNIVKKTEVQTGGFSKESILPKRNSDKLIARKKDWDPKKYGG | |
| | FDSPTVAYSVLVVAKVEKGKSKKLKSVKELLGITIMERSSFEKNPIDFLEAKGYKEVKKDLIIKLPKY | |
| | SLFELENGRKRMLASAGELQKGNELALPSKYVNFLYLASHYEKLKGSPEDNEQKQLFVEQHKHYLDEI | |
| | IEQISEFSKRVILADANLDKVLSAYNKHRDKPIREQAENIIHLFTLTNLGAPAAFKYFDTTIDRKRYT | |
| | STKEVLDATLIHQSITGLYETRIDLSQLGGDSGGSGGSGGSTNLSDIIEKETGKQLVIQESILMLPEE | |
| | VEEVIGNKPESDILVHTAYDESTDENVMLLTSDAPEYKPWALVIQDSNGENKIKMLSGGSGGSGGSTN | |
| | LSDIIEKETGKQLVIQESILMLPEEVEEVIGNKPESDILVHTAYDESTDENVMLLTSDAPEYKPWALV | |
| | IQDSNGENKIKMLSGGSKRTADGSEFEPKKKRKV | |
| APOBEC3G | MKRTADGSEFESPKKKRKVKPHFRNTVERMYRDTFSYNFYNRPILSRRNTVWLCYEVKTKGPSRPPLD | 232 |
| (A3G)-BE4 | AKIFRGQVYSELKYHPEMRFFHWFSKWRKLHRDQEYEVTWYISWSPCTKCTRDMATFLAEDPKVTLTI | |
| | FVARLYYFWDPDYQEALRSLCQKRDGPRATMKIMNYDEFQHCWSKFVYSQRELFEPWNNLPKYYILLH | |
| | IMLGEILRHSMDPPTFTFNFNNEPWVRGRHETYLCYEVERMHNDTWVLLNQRRGFLCNQAPHKHGFLE | |
| | GRHAELCFLDVIPFWKLDLDQDYRVTCFTSWSPCFSCAQEMAKFISKNKHVSLCIFTARIYDDQGRCQ | |
| | EGLRTLAEAGAKISIMTYSEFKHCWDTFVDHQGCPFQPWDGLDEHSQDLSGRLRAILQNQENSGGSSG | |
| | GSSGSETPGTSESATPESSGGSSGGSDKKYSIGLAIGTNSVGWAVITDEYKVPSKKFKVLGNTDRHSI | |
| | KKNLIGALLFDSGETAEATRLKRTARRRYTRRKNRICYLQEIFSNEMAKVDDSFFHRLEESFLVEEDK | |
| | KHERHPIFGNIVDEVAYHEKYPTIYHLRKKLVDSTDKADLRLIYLALAHMIKFRGHFLIEGDLNPDNS | |
| | DVDKLFIQLVQTYNQLFEENPINASGVDAKAILSARLSKSRRLENLIAQLPGEKKNGLFGNLIALSLG | |
| | LTPNFKSNFDLAEDAKLQLSKDTYDDDLDNLLAQIGDQYADLFLAAKNLSDAILLSDILRVNTEITKA | |
| | PLSASMIKRYDEHHQDLTLLKALVRQQLPEKYKEIFFDQSKNGYAGYIDGGASQEEFYKFIKPILEKM | |
| | DGTEELLVKLNREDLLRKQRTFDNGSIPHQIHLGELHAILRRQEDFYPFLKDNREKIEKILTFRIPYY | |
| | VGPLARGNSRFAWMTRKSEETITPWNFEEVVDKGASAQSFIERMTNFDKNLPNEKVLPKHSLLYEYFT | |
| | VYNELTKVKYVTEGMRKPAFLSGEQKKAIVDLLFKTNRKVTVKQLKEDYFKKIECFDSVEISGVEDRF | |
| | NASLGTYHDLLKIIKDKDFLDNEENEDILEDIVLTLTLFEDREMIEERLKTYAHLFDDKVMKQLKRRR | |
| | YTGWGRLSRKLINGIRDKQSGKTILDFLKSDGFANRNFMQLIHDDSLTFKEDIQKAQVSGQGDSLHEH | |
| | IANLAGSPAIKKGILQTVKVVDELVKVMGRHKPENIVIEMARENQTTQKGQKNSRERMKRIEEGIKEL | |
| | GSQILKEHPVENTQLQNEKLYLYYLQNGRDMYVDQELDINRLSDYDVDHIVPQSFLKDDSIDNKVLTR | |
| | SDKNRGKSDNVPSEEVVKKMKNYWRQLLNAKLITQRKFDNLTKAERGGLSELDKAGFIKRQLVETRQI | |
| | TKHVAQILDSRMNTKYDENDKLIREVKVITLKSKLVSDFRKDFQFYKVREINNYHHAHDAYLNAVVGT | |
| | ALIKKYPKLESEFVYGDYKVYDVRKMIAKSEQEIGKATAKYFFYSNIMNFFKTEITLANGEIRKRPLI | |
| | ETNGETGEIVWDKGRDFATVRKVLSMPQVNIVKKTEVQTGGFSKESILPKRNSDKLIARKKDWDPKKY | |
| | GGFDSPTVAYSVLVVAKVEKGKSKKLKSVKELLGITIMERSSFEKNPIDFLEAKGYKEVKKDLIIKLP | |
| | KYSLFELENGRKRMLASAGELQKGNELALPSKYVNFLYLASHYEKLKGSPEDNEQKQLFVEQHKHYLD | |
| | EIIEQISEFSKRVILADANLDKVLSAYNKHRDKPIREQAENIIHLFTLTNLGAPAAFKYFDTTIDRKR | |
| | YTSTKEVLDATLIHQSITGLYETRIDLSQLGGDSGGSGGSGGSTNLSDIIEKETGKQLVIQESILMLP | |
| | EEVEEVIGNKPESDILVHTAYDESTDENVMLLTSDAPEYKPWALVIQDSNGENKIKMLSGGSGGSGGS | |
| | TNLSDIIEKETGKQLVIQESILMLPEEVEEVIGNKPESDILVHTAYDESTDENVMLLTSDAPEYKPWA | |
| | LVIQDSNGENKIKMLSGGSKRTADGSEFEPKKKRKV | |
| AID-BE4 | MKRTADGSEFESPKKKRKVDSLLMNRRKFLYQFKNVRWAKGRRETYLCYVVKRRDSATSFSLDFGYLR | 233 |
| | NKNGCHVELLFLRYISDWDLDPGRCYRVTWFTSWSPCYDCARHVADFLRGNPNLSLRIFTARLYFCED | |
| | RKAEPEGLRRLHRAGVQIAIMTFKDYFYCWNTFVENHERTFKAWEGLHENSVRLSRQLRRILLPLYEV | |
| | DDLRDAFRTLGLSGGSSGGSSGSETPGTSESATPESSGGSSGGSDKKYSIGLAIGTNSVGWAVITDEY | |
| | KVPSKKFKVLGNTDRHSIKKNLIGALLFDSGETAEATRLKRTARRRYTRRKNRICYLQEIFSNEMAKV | |
| | DDSFFHRLEESFLVEEDKKHERHPIFGNIVDEVAYHEKYPTIYHLRKKLVDSTDKADLRLIYLALAHM | |
| | IKFRGHFLIEGDLNPDNSDVDKLFIQLVQTYNQLFEENPINASGVDAKAILSARLSKSRRLENLIAQL | |
| | PGEKKNGLFGNLIALSLGLTPNFKSNFDLAEDAKLQLSKDTYDDDLDNLLAQIGDQYADLFLAAKNLS | |
| | DAILLSDILRVNTEITKAPLSASMIKRYDEHHQDLTLLKALVRQQLPEKYKEIFFDQSKNGYAGYIDG | |
| | GASQEEFYKFIKPILEKMDGTEELLVKLNREDLLRKQRTFDNGSIPHQIHLGELHAILRRQEDFYPFL | |
| | KDNREKIEKILTFRIPYYVGPLARGNSRFAWMTRKSEETITPWNFEEVVDKGASAQSFIERMTNFDKN | |
| | LPNEKVLPKHSLLYEYFTVYNELTKVKYVTEGMRKPAFLSGEQKKAIVDLLFKTNRKVTVKQLKEDYF | |
| | KKIECFDSVEISGVEDRFNASLGTYHDLLKIIKDKDFLDNEENEDILEDIVLTLTLFEDREMIEERLK | |
| | TYAHLFDDKVMKQLKRRRYTGWGRLSRKLINGIRDKQSGKTILDFLKSDGFANRNFMQLIHDDSLTFK | |
| | EDIQKAQVSGQGDSLHEHIANLAGSPAIKKGILQTVKVVDELVKVMGRHKPENIVIEMARENQTTQKG | |
| | QKNSRERMKRIEEGIKELGSQILKEHPVENTQLQNEKLYLYYLQNGRDMYVDQELDINRLSDYDVDHI | |
| | VPQSFLKDDSIDNKVLTRSDKNRGKSDNVPSEEVVKKMKNYWRQLLNAKLITQRKFDNLTKAERGGLS | |
| | ELDKAGFIKRQLVETRQITKHVAQILDSRMNTKYDENDKLIREVKVITLKSKLVSDFRKDFQFYKVRE | |
| | INNYHHAHDAYLNAVVGTALIKKYPKLESEFVYGDYKVYDVRKMIAKSEQEIGKATAKYFFYSNIMNF | |
| | FKTEITLANGEIRKRPLIETNGETGEIVWDKGRDFATVRKVLSMPQVNIVKKTEVQTGGFSKESILPK | |
| | RNSDKLIARKKDWDPKKYGGFDSPTVAYSVLVVAKVEKGKSKKLKSVKELLGITIMERSSFEKNPIDF | |
| | LEAKGYKEVKKDLIIKLPKYSLFELENGRKRMLASAGELQKGNELALPSKYVNFLYLASHYEKLKGSP | |
| | EDNEQKQLFVEQHKHYLDEIIEQISEFSKRVILADANLDKVLSAYNKHRDKPIREQAENIIHLFTLTN | |
| | LGAPAAFKYFDTTIDRKRYTSTKEVLDATLIHQSITGLYETRIDLSQLGGDSGGSGGSGGSTNLSDII | |
| | EKETGKQLVIQESILMLPEEVEEVIGNKPESDILVHTAYDESTDENVMLLTSDAPEYKPWALVIQDSN | |
| | GENKIKMLSGGSGGSGGSTNLSDIIEKETGKQLVIQESILMLPEEVEEVIGNKPESDILVHTAYDEST | |
| | DENVMLLTSDAPEYKPWALVIQDSNGENKIKMLSGGSKRTADGSEFEPKKKRKV | |
| CDA-BE4 | MKRTADGSEFESPKKKRKVTDAEYVRIHEKLDIYTFKKQFFNNKKSVSHRCYVLFELKRRGERRACFW | 234 |
| | GYAVNKPQSGTERGIHAEIFSIRKVEEYLRDNPGQFTINWYSSWSPCADCAEKILEWYNQELRGNGHT | |
| | LKIWACKLYYEKNARNQIGLWNLRDNGVGLNVMVSEHYQCCRKIFIQSSHNQLNENRWLEKTLKRAEK | |
| | RRSELSIMIQVKILHTTKSPAVSGGSSGGSSGSETPGTSESATPESSGGSSGGSDKKYSIGLAIGTNS | |
| | VGWAVITDEYKVPSKKFKVLGNTDRHSIKKNLIGALLFDSGETAEATRLKRTARRRYTRRKNRICYLQ | |
| | EIFSNEMAKVDDSFFHRLEESFLVEEDKKHERHPIFGNIVDEVAYHEKYPTIYHLRKKLVDSTDKADL | |
| | RLIYLALAHMIKFRGHFLIEGDLNPDNSDVDKLFIQLVQTYNQLFEENPINASGVDAKAILSARLSKS | |
| | RRLENLIAQLPGEKKNGLFGNLIALSLGLTPNFKSNFDLAEDAKLQLSKDTYDDDLDNLLAQIGDQYA | |
| | DLFLAAKNLSDAILLSDILRVNTEITKAPLSASMIKRYDEHHQDLTLLKALVRQQLPEKYKEIFFDQS | |
| | KNGYAGYIDGGASQEEFYKFIKPILEKMDGTEELLVKLNREDLLRKQRTFDNGSIPHQIHLGELHAIL | |
| | RRQEDFYPFLKDNREKIEKILTFRIPYYVGPLARGNSRFAWMTRKSEETITPWNFEEVVDKGASAQSF | |
| | IERMTNFDKNLPNEKVLPKHSLLYEYFTVYNELTKVKYVTEGMRKPAFLSGEQKKAIVDLLFKTNRKV | |
| | TVKQLKEDYFKKIECFDSVEISGVEDRFNASLGTYHDLLKIIKDKDFLDNEENEDILEDIVLTLTLFE | |
| | DREMIEERLKTYAHLFDDKVMKQLKRRRYTGWGRLSRKLINGIRDKQSGKTILDFLKSDGFANRNFMQ | |
| | LIHDDSLTFKEDIQKAQVSGQGDSLHEHIANLAGSPAIKKGILQTVKVVDELVKVMGRHKPENIVIEM | |
| | ARENQTTQKGQKNSRERMKRIEEGIKELGSQILKEHPVENTQLQNEKLYLYYLQNGRDMYVDQELDIN | |
| | RLSDYDVDHIVPQSFLKDDSIDNKVLTRSDKNRGKSDNVPSEEVVKKMKNYWRQLLNAKLITQRKFDN | |
| | LTKAERGGLSELDKAGFIKRQLVETRQITKHVAQILDSRMNTKYDENDKLIREVKVITLKSKLVSDFR | |
| | KDFQFYKVREINNYHHAHDAYLNAVVGTALIKKYPKLESEFVYGDYKVYDVRKMIAKSEQEIGKATAK | |
| | YFFYSNIMNFFKTEITLANGEIRKRPLIETNGETGEIVWDKGRDFATVRKVLSMPQVNIVKKTEVQTG | |
| | GFSKESILPKRNSDKLIARKKDWDPKKYGGFDSPTVAYSVLVVAKVEKGKSKKLKSVKELLGITIMER | |
| | SSFEKNPIDFLEAKGYKEVKKDLIIKLPKYSLFELENGRKRMLASAGELQKGNELALPSKYVNFLYLA | |
| | SHYEKLKGSPEDNEQKQLFVEQHKHYLDEIIEQISEFSKRVILADANLDKVLSAYNKHRDKPIREQAE | |
| | NIIHLFTLTNLGAPAAFKYFDTTIDRKRYTSTKEVLDATLIHQSITGLYETRIDLSQLGGDSGGSGGS | |
| | GGSTNLSDIIEKETGKQLVIQESILMLPEEVEEVIGNKPESDILVHTAYDESTDENVMLLTSDAPEYK | |
| | PWALVIQDSNGENKIKMLSGGSGGSGGSTNLSDIIEKETGKQLVIQESILMLPEEVEEVIGNKPESDI | |
| | LVHTAYDESTDENVMLLTSDAPEYKPWALVIQDSNGENKIKMLSGGSKRTADGSEFEPKKKRKV | |
| FERNY-BE4 | MKRTADGSEFESPKKKRKVFERNYDPRELRKETYLLYEIKWGKSGKLWRHWCQNNRTQHAEVYFLENI | 235 |
| | FNARRFNPSTHCSITWYLSWSPCAECSQKIVDFLKEHPNVNLEIYVARLYYHEDERNRQGLRDLVNSG | |
| | VTIRIMDLPDYNYCWKTFVSDQGGDEDYWPGHFAPWIKQYSLKLSGGSSGGSSGSETPGTSESATPES | |
| | SGGSSGGSDKKYSIGLAIGTNSVGWAVITDEYKVPSKKFKVLGNTDRHSIKKNLIGALLFDSGETAEA | |
| | TRLKRTARRRYTRRKNRICYLQEIFSNEMAKVDDSFFHRLEESFLVEEDKKHERHPIFGNIVDEVAYH | |
| | EKYPTIYHLRKKLVDSTDKADLRLIYLALAHMIKFRGHFLIEGDLNPDNSDVDKLFIQLVQTYNQLFE | |
| | ENPINASGVDAKAILSARLSKSRRLENLIAQLPGEKKNGLFGNLIALSLGLTPNFKSNFDLAEDAKLQ | |
| | LSKDTYDDDLDNLLAQIGDQYADLFLAAKNLSDAILLSDILRVNTEITKAPLSASMIKRYDEHHQDLT | |
| | LLKALVRQQLPEKYKEIFFDQSKNGYAGYIDGGASQEEFYKFIKPILEKMDGTEELLVKLNREDLLRK | |
| | QRTFDNGSIPHQIHLGELHAILRRQEDFYPFLKDNREKIEKILTFRIPYYVGPLARGNSRFAWMTRKS | |
| | EETITPWNFEEVVDKGASAQSFIERMTNFDKNLPNEKVLPKHSLLYEYFTVYNELTKVKYVTEGMRKP | |
| | AFLSGEQKKAIVDLLFKTNRKVTVKQLKEDYFKKIECFDSVEISGVEDRFNASLGTYHDLLKIIKDKD | |
| | FLDNEENEDILEDIVLTLTLFEDREMIEERLKTYAHLFDDKVMKQLKRRRYTGWGRLSRKLINGIRDK | |
| | QSGKTILDFLKSDGFANRNFMQLIHDDSLTFKEDIQKAQVSGQGDSLHEHIANLAGSPAIKKGILQTV | |
| | KVVDELVKVMGRHKPENIVIEMARENQTTQKGQKNSRERMKRIEEGIKELGSQILKEHPVENTQLQNE | |
| | KLYLYYLQNGRDMYVDQELDINRLSDYDVDHIVPQSFLKDDSIDNKVLTRSDKNRGKSDNVPSEEVVK | |
| | KMKNYWRQLLNAKLITQRKFDNLTKAERGGLSELDKAGFIKRQLVETRQITKHVAQILDSRMNTKYDE | |
| | NDKLIREVKVITLKSKLVSDFRKDFQFYKVREINNYHHAHDAYLNAVVGTALIKKYPKLESEFVYGDY | |
| | KVYDVRKMIAKSEQEIGKATAKYFFYSNIMNFFKTEITLANGEIRKRPLIETNGETGEIVWDKGRDFA | |
| | TVRKVLSMPQVNIVKKTEVQTGGFSKESILPKRNSDKLIARKKDWDPKKYGGFDSPTVAYSVLVVAKV | |
| | EKGKSKKLKSVKELLGITIMERSSFEKNPIDFLEAKGYKEVKKDLIIKLPKYSLFELENGRKRMLASA | |
| | GELQKGNELALPSKYVNFLYLASHYEKLKGSPEDNEQKQLFVEQHKHYLDEIIEQISEFSKRVILADA | |
| | NLDKVLSAYNKHRDKPIREQAENIIHLFTLTNLGAPAAFKYFDTTIDRKRYTSTKEVLDATLIHQSIT | |
| | GLYETRIDLSQLGGDSGGSGGSGGSTNLSDIIEKETGKQLVIQESILMLPEEVEEVIGNKPESDILVH | |
| | TAYDESTDENVMLLTSDAPEYKPWALVIQDSNGENKIKMLSGGSGGSGGSTNLSDIIEKETGKQLVIQ | |
| | ESILMLPEEVEEVIGNKPESDILVHTAYDESTDENVMLLTSDAPEYKPWALVIQDSNGENKIKMLSGG | |
| | SKRTADGSEFEPKKKRKV | |
| Evolved | MKRTADGSEFESPKKKRKVEASPASGPRHLMDPHIFTSNFNNGIGRHKTYLCYEVERLDNGTSVKMDQ | 236 |
| APOBEC3A | HRGFLHGQAKNLLCGFYGRHAELRFLDLVPSLQLDPAQIYRVTWFISWSPCFSWGCAGEVRAFLQENT | |
| (eA3A)-BE4 | HVRLRIFAARIYDYDPLYKEALQMLRDAGAQVSIMTYDEFKHCWDTFVDHQGCPFQPWDGLDEHSQAL | |
| | SGRLRAILQNQGNSGGSSGGSSGSETPGTSESATPESSGGSSGGSDKKYSIGLAIGTNSVGWAVITDE | |
| | YKVPSKKFKVLGNTDRHSIKKNLIGALLFDSGETAEATRLKRTARRRYTRRKNRICYLQEIFSNEMAK | |
| | VDDSFFHRLEESFLVEEDKKHERHPIFGNIVDEVAYHEKYPTIYHLRKKLVDSTDKADLRLIYLALAH | |
| | MIKFRGHFLIEGDLNPDNSDVDKLFIQLVQTYNQLFEENPINASGVDAKAILSARLSKSRRLENLIAQ | |
| | LPGEKKNGLFGNLIALSLGLTPNFKSNFDLAEDAKLQLSKDTYDDDLDNLLAQIGDQYADLFLAAKNL | |
| | SDAILLSDILRVNTEITKAPLSASMIKRYDEHHQDLTLLKALVRQQLPEKYKEIFFDQSKNGYAGYID | |
| | GGASQEEFYKFIKPILEKMDGTEELLVKLNREDLLRKQRTFDNGSIPHQIHLGELHAILRRQEDFYPF | |
| | LKDNREKIEKILTFRIPYYVGPLARGNSRFAWMTRKSEETITPWNFEEVVDKGASAQSFIERMTNFDK | |
| | NLPNEKVLPKHSLLYEYFTVYNELTKVKYVTEGMRKPAFLSGEQKKAIVDLLFKTNRKVTVKQLKEDY | |
| | FKKIECFDSVEISGVEDRFNASLGTYHDLLKIIKDKDFLDNEENEDILEDIVLTLTLFEDREMIEERL | |
| | KTYAHLFDDKVMKQLKRRRYTGWGRLSRKLINGIRDKQSGKTILDFLKSDGFANRNFMQLIHDDSLTF | |
| | KEDIQKAQVSGQGDSLHEHIANLAGSPAIKKGILQTVKVVDELVKVMGRHKPENIVIEMARENQTTQK | |
| | GQKNSRERMKRIEEGIKELGSQILKEHPVENTQLQNEKLYLYYLQNGRDMYVDQELDINRLSDYDVDH | |
| | IVPQSFLKDDSIDNKVLTRSDKNRGKSDNVPSEEVVKKMKNYWRQLLNAKLITQRKFDNLTKAERGGL | |
| | SELDKAGFIKRQLVETRQITKHVAQILDSRMNTKYDENDKLIREVKVITLKSKLVSDFRKDFQFYKVR | |
| | EINNYHHAHDAYLNAVVGTALIKKYPKLESEFVYGDYKVYDVRKMIAKSEQEIGKATAKYFFYSNIMN | |
| | FFKTEITLANGEIRKRPLIETNGETGEIVWDKGRDFATVRKVLSMPQVNIVKKTEVQTGGFSKESILP | |
| | KRNSDKLIARKKDWDPKKYGGFDSPTVAYSVLVVAKVEKGKSKKLKSVKELLGITIMERSSFEKNPID | |
| | FLEAKGYKEVKKDLIIKLPKYSLFELENGRKRMLASAGELQKGNELALPSKYVNFLYLASHYEKLKGS | |
| | PEDNEQKQLFVEQHKHYLDEIIEQISEFSKRVILADANLDKVLSAYNKHRDKPIREQAENIIHLFTLT | |
| | NLGAPAAFKYFDTTIDRKRYTSTKEVLDATLIHQSITGLYETRIDLSQLGGDSGGSGGSGGSTNLSDI | |
| | IEKETGKQLVIQESILMLPEEVEEVIGNKPESDILVHTAYDESTDENVMLLTSDAPEYKPWALVIQDS | |
| | NGENKIKMLSGGSGGSGGSTNLSDIIEKETGKQLVIQESILMLPEEVEEVIGNKPESDILVHTAYDES | |
| | TDENVMLLTSDAPEYKPWALVIQDSNGENKIKMLSGGSKRTADGSEFEPKKKRKV | |
| AALN-BE4 | MKRTADGSEFESPKKKRKVSSETGPVAVDPTLRRRIEPHEFEVFFDPRELAAETCLLYEINWGGRHSI | 237 |
| | WRHTSQNTNKHVEVNFIEKFTTERYFCPNTRCSITWFLSWSPCGECSRAITEFLSRYPHVTLFIYIAR | |
| | LYHLANPRNRQGLRDLISSGVTIQIMTEQESGYCWRNFVNYSPSNEAHWPRYPHLWVRLYVLELYCII | |
| | LGLPPCLNILRRKQPQLTFFTIALQSCHYQRLPPHILWATGLKSGGSSGGSSGSETPGTSESATPESS | |
| | GGSSGGSDKKYSIGLAIGTNSVGWAVITDEYKVPSKKFKVLGNTDRHSIKKNLIGALLFDSGETAEAT | |
| | RLKRTARRRYTRRKNRICYLQEIFSNEMAKVDDSFFHRLEESFLVEEDKKHERHPIFGNIVDEVAYHE | |
| | KYPTIYHLRKKLVDSTDKADLRLIYLALAHMIKFRGHFLIEGDLNPDNSDVDKLFIQLVQTYNQLFEE | |
| | NPINASGVDAKAILSARLSKSRRLENLIAQLPGEKKNGLFGNLIALSLGLTPNFKSNFDLAEDAKLQL | |
| | SKDTYDDDLDNLLAQIGDQYADLFLAAKNLSDAILLSDILRVNTEITKAPLSASMIKRYDEHHQDLTL | |
| | LKALVRQQLPEKYKEIFFDQSKNGYAGYIDGGASQEEFYKFIKPILEKMDGTEELLVKLNREDLLRKQ | |
| | RTFDNGSIPHQIHLGELHAILRRQEDFYPFLKDNREKIEKILTFRIPYYVGPLARGNSRFAWMTRKSE | |
| | ETITPWNFEEVVDKGASAQSFIERMTNFDKNLPNEKVLPKHSLLYEYFTVYNELTKVKYVTEGMRKPA | |
| | FLSGEQKKAIVDLLFKTNRKVTVKQLKEDYFKKIECFDSVEISGVEDRFNASLGTYHDLLKIIKDKDF | |
| | LDNEENEDILEDIVLTLTLFEDREMIEERLKTYAHLFDDKVMKQLKRRRYTGWGRLSRKLINGIRDKQ | |
| | SGKTILDFLKSDGFANRNFMQLIHDDSLTFKEDIQKAQVSGQGDSLHEHIANLAGSPAIKKGILQTVK | |
| | VVDELVKVMGRHKPENIVIEMARENQTTQKGQKNSRERMKRIEEGIKELGSQILKEHPVENTQLQNEK | |
| | LYLYYLQNGRDMYVDQELDINRLSDYDVDHIVPQSFLKDDSIDNKVLTRSDKNRGKSDNVPSEEVVKK | |
| | MKNYWRQLLNAKLITQRKFDNLTKAERGGLSELDKAGFIKRQLVETRQITKHVAQILDSRMNTKYDEN | |
| | DKLIREVKVITLKSKLVSDFRKDFQFYKVREINNYHHAHDAYLNAVVGTALIKKYPKLESEFVYGDYK | |
| | VYDVRKMIAKSEQEIGKATAKYFFYSNIMNFFKTEITLANGEIRKRPLIETNGETGEIVWDKGRDFAT | |
| | VRKVLSMPQVNIVKKTEVQTGGFSKESILPKRNSDKLIARKKDWDPKKYGGFDSPTVAYSVLVVAKVE | |
| | KGKSKKLKSVKELLGITIMERSSFEKNPIDFLEAKGYKEVKKDLIIKLPKYSLFELENGRKRMLASAG | |
| | ELQKGNELALPSKYVNFLYLASHYEKLKGSPEDNEQKQLFVEQHKHYLDEIIEQISEFSKRVILADAN | |
| | LDKVLSAYNKHRDKPIREQAENIIHLFTLTNLGAPAAFKYFDTTIDRKRYTSTKEVLDATLIHQSITG | |
| | LYETRIDLSQLGGDSGGSGGSGGSTNLSDIIEKETGKQLVIQESILMLPEEVEEVIGNKPESDILVHT | |
| | AYDESTDENVMLLTSDAPEYKPWALVIQDSNGENKIKMLSGGSGGSGGSTNLSDIIEKETGKQLVIQE | |
| | SILMLPEEVEEVIGNKPESDILVHTAYDESTDENVMLLTSDAPEYKPWALVIQDSNGENKIKMLSGGS | |
| | KRTADGSEFEPKKKRKV | |
| BE4max, | MKRTADGSEFESPKKKRKVSSETGPVAVDPTLRRRIEPHEFEVFFDPRELRKETCLLYEINWGGRHSI | 238 |
| modified with | WRHTSQNTNKHVEVNFIEKFTTERYFCPNTRCSITWFLSWSPCGECSRAITEFLSRYPHVTLFIYIAR | |
| SpCas9-NG | LYHHADPRNRQGLRDLISSGVTIQIMTEQESGYCWRNFVNYSPSNEAHWPRYPHLWVRLYVLELYCII | |
| | LGLPPCLNILRRKQPQLTFFTIALQSCHYQRLPPHILWATGLKSGGSSGGSSGSETPGTSESATPESS | |
| | GGSSGGSDKKYSIGLAIGTNSVGWAVITDEYKVPSKKFKVLGNTDRHSIKKNLIGALLFDSGETAEAT | |
| | RLKRTARRRYTRRKNRICYLQEIFSNEMAKVDDSFFHRLEESFLVEEDKKHERHPIFGNIVDEVAYHE | |
| | KYPTIYHLRKKLVDSTDKADLRLIYLALAHMIKFRGHFLIEGDLNPDNSDVDKLFIQLVQTYNQLFEE | |
| | NPINASGVDAKAILSARLSKSRRLENLIAQLPGEKKNGLFGNLIALSLGLTPNFKSNFDLAEDAKLQL | |
| | SKDTYDDDLDNLLAQIGDQYADLFLAAKNLSDAILLSDILRVNTEITKAPLSASMIKRYDEHHQDLTL | |
| | LKALVRQQLPEKYKEIFFDQSKNGYAGYIDGGASQEEFYKFIKPILEKMDGTEELLVKLNREDLLRKQ | |
| | RTFDNGSIPHQIHLGELHAILRRQEDFYPFLKDNREKIEKILTFRIPYYVGPLARGNSRFAWMTRKSE | |
| | ETITPWNFEEVVDKGASAQSFIERMTNFDKNLPNEKVLPKHSLLYEYFTVYNELTKVKYVTEGMRKPA | |
| | FLSGEQKKAIVDLLFKTNRKVTVKQLKEDYFKKIECFDSVEISGVEDRFNASLGTYHDLLKIIKDKDF | |
| | LDNEENEDILEDIVLTLTLFEDREMIEERLKTYAHLFDDKVMKQLKRRRYTGWGRLSRKLINGIRDKQ | |
| | SGKTILDFLKSDGFANRNFMQLIHDDSLTFKEDIQKAQVSGQGDSLHEHIANLAGSPAIKKGILQTVK | |
| | VVDELVKVMGRHKPENIVIEMARENQTTQKGQKNSRERMKRIEEGIKELGSQILKEHPVENTQLQNEK | |
| | LYLYYLQNGRDMYVDQELDINRLSDYDVDHIVPQSFLKDDSIDNKVLTRSDKNRGKSDNVPSEEVVKK | |
| | MKNYWRQLLNAKLITQRKFDNLTKAERGGLSELDKAGFIKRQLVETRQITKHVAQILDSRMNTKYDEN | |
| | DKLIREVKVITLKSKLVSDFRKDFQFYKVREINNYHHAHDAYLNAVVGTALIKKYPKLESEFVYGDYK | |
| | VYDVRKMIAKSEQEIGKATAKYFFYSNIMNFFKTEITLANGEIRKRPLIETNGETGEIVWDKGRDFAT | |
| | VRKVLSMPQVNIVKKTEVQTGGFSKESIRPKRNSDKLIARKKDWDPKKYGGFVSPTVAYSVLVVAKVE | |
| | KGKSKKLKSVKELLGITIMERSSFEKNPIDFLEAKGYKEVKKDLIIKLPKYSLFELENGRKRMLASAR | |
| | FLQKGNELALPSKYVNFLYLASHYEKLKGSPEDNEQKQLFVEQHKHYLDEIIEQISEFSKRVILADAN | |
| | LDKVLSAYNKHRDKPIREQAENIIHLFTLTNLGAPRAFKYFDTTIDRKVYRSTKEVLDATLIHQSITG | |
| | LYETRIDLSQLGGDSGGSGGSGGSTNLSDIIEKETGKQLVIQESILMLPEEVEEVIGNKPESDILVHT | |
| | AYDESTDENVMLLTSDAPEYKPWALVIQDSNGENKIKMLSGGSGGSGGSTNLSDIIEKETGKQLVIQE | |
| | SILMLPEEVEEVIGNKPESDILVHTAYDESTDENVMLLTSDAPEYKPWALVIQDSNGENKIKMLSGGS | |
| | KRTADGSEFEPKKKRKV | |
| YEl-SpCas9-NG | MKRTADGSEFESPKKKRKVSSETGPVAVDPTLRRRIEPHEFEVFFDPRELRKETCLLYEINWGGRHSI | 239 |
| base editor | WRHTSQNTNKHVEVNFIEKFTTERYFCPNTRCSITWFLSYSPCGECSRAITEFLSRYPHVTLFIYIAR | |
| (YEl-NG) | LYHHADPENRQGLRDLISSGVTIQIMTEQESGYCWRNFVNYSPSNEAHWPRYPHLWVRLYVLELYCII | |
| | LGLPPCLNILRRKQPQLTFFTIALQSCHYQRLPPHILWATGLKSGGSSGGSSGSETPGTSESATPESS | |
| | GGSSGGSDKKYSIGLAIGTNSVGWAVITDEYKVPSKKFKVLGNTDRHSIKKNLIGALLFDSGETAEAT | |
| | RLKRTARRRYTRRKNRICYLQEIFSNEMAKVDDSFFHRLEESFLVEEDKKHERHPIFGNIVDEVAYHE | |
| | KYPTIYHLRKKLVDSTDKADLRLIYLALAHMIKFRGHFLIEGDLNPDNSDVDKLFIQLVQTYNQLFEE | |
| | NPINASGVDAKAILSARLSKSRRLENLIAQLPGEKKNGLFGNLIALSLGLTPNFKSNFDLAEDAKLQL | |
| | SKDTYDDDLDNLLAQIGDQYADLFLAAKNLSDAILLSDILRVNTEITKAPLSASMIKRYDEHHQDLTL | |
| | LKALVRQQLPEKYKEIFFDQSKNGYAGYIDGGASQEEFYKFIKPILEKMDGTEELLVKLNREDLLRKQ | |
| | RTFDNGSIPHQIHLGELHAILRRQEDFYPFLKDNREKIEKILTFRIPYYVGPLARGNSRFAWMTRKSE | |
| | ETITPWNFEEVVDKGASAQSFIERMTNFDKNLPNEKVLPKHSLLYEYFTVYNELTKVKYVTEGMRKPA | |
| | FLSGEQKKAIVDLLFKTNRKVTVKQLKEDYFKKIECFDSVEISGVEDRFNASLGTYHDLLKIIKDKDF | |
| | LDNEENEDILEDIVLTLTLFEDREMIEERLKTYAHLFDDKVMKQLKRRRYTGWGRLSRKLINGIRDKQ | |
| | SGKTILDFLKSDGFANRNFMQLIHDDSLTFKEDIQKAQVSGQGDSLHEHIANLAGSPAIKKGILQTVK | |
| | VVDELVKVMGRHKPENIVIEMARENQTTQKGQKNSRERMKRIEEGIKELGSQILKEHPVENTQLQNEK | |
| | LYLYYLQNGRDMYVDQELDINRLSDYDVDHIVPQSFLKDDSIDNKVLTRSDKNRGKSDNVPSEEVVKK | |
| | MKNYWRQLLNAKLITQRKFDNLTKAERGGLSELDKAGFIKRQLVETRQITKHVAQILDSRMNTKYDEN | |
| | DKLIREVKVITLKSKLVSDFRKDFQFYKVREINNYHHAHDAYLNAVVGTALIKKYPKLESEFVYGDYK | |
| | VYDVRKMIAKSEQEIGKATAKYFFYSNIMNFFKTEITLANGEIRKRPLIETNGETGEIVWDKGRDFAT | |
| | VRKVLSMPQVNIVKKTEVQTGGFSKESIRPKRNSDKLIARKKDWDPKKYGGFVSPTVAYSVLVVAKVE | |
| | KGKSKKLKSVKELLGITIMERSSFEKNPIDFLEAKGYKEVKKDLIIKLPKYSLFELENGRKRMLASAR | |
| | FLQKGNELALPSKYVNFLYLASHYEKLKGSPEDNEQKQLFVEQHKHYLDEIIEQISEFSKRVILADAN | |
| | LDKVLSAYNKHRDKPIREQAENIIHLFTLTNLGAPRAFKYFDTTIDRKVYRSTKEVLDATLIHQSITG | |
| | LYETRIDLSQLGGDSGGSGGSGGSTNLSDIIEKETGKQLVIQESILMLPEEVEEVIGNKPESDILVHT | |
| | AYDESTDENVMLLTSDAPEYKPWALVIQDSNGENKIKMLSGGSGGSGGSTNLSDIIEKETGKQLVIQE | |
| | SILMLPEEVEEVIGNKPESDILVHTAYDESTDENVMLLTSDAPEYKPWALVIQDSNGENKIKMLSGGS | |
| | KRTADGSEFEPKKKRKV | |
| YE2-SpCas9-NG | MKRTADGSEFESPKKKRKVSSETGPVAVDPTLRRRIEPHEFEVFFDPRELRKETCLLYEINWGGRHSI | 240 |
| base editor | WRHTSQNTNKHVEVNFIEKFTTERYFCPNTRCSITWFLSYSPCGECSRAITEFLSRYPHVTLFIYIAR | |
| | LYHHADPRNRQGLEDLISSGVTIQIMTEQESGYCWRNFVNYSPSNEAHWPRYPHLWVRLYVLELYCII | |
| | LGLPPCLNILRRKQPQLTFFTIALQSCHYQRLPPHILWATGLKSGGSSGGSSGSETPGTSESATPESS | |
| | GGSSGGSDKKYSIGLAIGTNSVGWAVITDEYKVPSKKFKVLGNTDRHSIKKNLIGALLFDSGETAEAT | |
| | RLKRTARRRYTRRKNRICYLQEIFSNEMAKVDDSFFHRLEESFLVEEDKKHERHPIFGNIVDEVAYHE | |
| | KYPTIYHLRKKLVDSTDKADLRLIYLALAHMIKFRGHFLIEGDLNPDNSDVDKLFIQLVQTYNQLFEE | |
| | NPINASGVDAKAILSARLSKSRRLENLIAQLPGEKKNGLFGNLIALSLGLTPNFKSNFDLAEDAKLQL | |
| | SKDTYDDDLDNLLAQIGDQYADLFLAAKNLSDAILLSDILRVNTEITKAPLSASMIKRYDEHHQDLTL | |
| | LKALVRQQLPEKYKEIFFDQSKNGYAGYIDGGASQEEFYKFIKPILEKMDGTEELLVKLNREDLLRKQ | |
| | RTFDNGSIPHQIHLGELHAILRRQEDFYPFLKDNREKIEKILTFRIPYYVGPLARGNSRFAWMTRKSE | |
| | ETITPWNFEEVVDKGASAQSFIERMTNFDKNLPNEKVLPKHSLLYEYFTVYNELTKVKYVTEGMRKPA | |
| | FLSGEQKKAIVDLLFKTNRKVTVKQLKEDYFKKIECFDSVEISGVEDRFNASLGTYHDLLKIIKDKDF | |
| | LDNEENEDILEDIVLTLTLFEDREMIEERLKTYAHLFDDKVMKQLKRRRYTGWGRLSRKLINGIRDKQ | |
| | SGKTILDFLKSDGFANRNFMQLIHDDSLTFKEDIQKAQVSGQGDSLHEHIANLAGSPAIKKGILQTVK | |
| | VVDELVKVMGRHKPENIVIEMARENQTTQKGQKNSRERMKRIEEGIKELGSQILKEHPVENTQLQNEK | |
| | LYLYYLQNGRDMYVDQELDINRLSDYDVDHIVPQSFLKDDSIDNKVLTRSDKNRGKSDNVPSEEVVKK | |
| | MKNYWRQLLNAKLITQRKFDNLTKAERGGLSELDKAGFIKRQLVETRQITKHVAQILDSRMNTKYDEN | |
| | DKLIREVKVITLKSKLVSDFRKDFQFYKVREINNYHHAHDAYLNAVVGTALIKKYPKLESEFVYGDYK | |
| | VYDVRKMIAKSEQEIGKATAKYFFYSNIMNFFKTEITLANGEIRKRPLIETNGETGEIVWDKGRDFAT | |
| | VRKVLSMPQVNIVKKTEVQTGGFSKESIRPKRNSDKLIARKKDWDPKKYGGFVSPTVAYSVLVVAKVE | |
| | KGKSKKLKSVKELLGITIMERSSFEKNPIDFLEAKGYKEVKKDLIIKLPKYSLFELENGRKRMLASAR | |
| | FLQKGNELALPSKYVNFLYLASHYEKLKGSPEDNEQKQLFVEQHKHYLDEIIEQISEFSKRVILADAN | |
| | LDKVLSAYNKHRDKPIREQAENIIHLFTLTNLGAPRAFKYFDTTIDRKVYRSTKEVLDATLIHQSITG | |
| | LYETRIDLSQLGGDSGGSGGSGGSTNLSDIIEKETGKQLVIQESILMLPEEVEEVIGNKPESDILVHT | |
| | AYDESTDENVMLLTSDAPEYKPWALVIQDSNGENKIKMLSGGSGGSGGSTNLSDIIEKETGKQLVIQE | |
| | SILMLPEEVEEVIGNKPESDILVHTAYDESTDENVMLLTSDAPEYKPWALVIQDSNGENKIKMLSGGS | |
| | KRTADGSEFEPKKKRKV | |
| YEE-SpCas9-NG | MKRTADGSEFESPKKKRKVSSETGPVAVDPTLRRRIEPHEFEVFFDPRELRKETCLLYEINWGGRHSI | 241 |
| base editor | WRHTSQNTNKHVEVNFIEKFTTERYFCPNTRCSITWFLSYSPCGECSRAITEFLSRYPHVTLFIYIAR | |
| | LYHHADPENRQGLEDLISSGVTIQIMTEQESGYCWRNFVNYSPSNEAHWPRYPHLWVRLYVLELYCII | |
| | LGLPPCLNILRRKQPQLTFFTIALQSCHYQRLPPHILWATGLKSGGSSGGSSGSETPGTSESATPESS | |
| | GGSSGGSDKKYSIGLAIGTNSVGWAVITDEYKVPSKKFKVLGNTDRHSIKKNLIGALLFDSGETAEAT | |
| | RLKRTARRRYTRRKNRICYLQEIFSNEMAKVDDSFFHRLEESFLVEEDKKHERHPIFGNIVDEVAYHE | |
| | KYPTIYHLRKKLVDSTDKADLRLIYLALAHMIKFRGHFLIEGDLNPDNSDVDKLFIQLVQTYNQLFEE | |
| | NPINASGVDAKAILSARLSKSRRLENLIAQLPGEKKNGLFGNLIALSLGLTPNFKSNFDLAEDAKLQL | |
| | SKDTYDDDLDNLLAQIGDQYADLFLAAKNLSDAILLSDILRVNTEITKAPLSASMIKRYDEHHQDLTL | |
| | LKALVRQQLPEKYKEIFFDQSKNGYAGYIDGGASQEEFYKFIKPILEKMDGTEELLVKLNREDLLRKQ | |
| | RTFDNGSIPHQIHLGELHAILRRQEDFYPFLKDNREKIEKILTFRIPYYVGPLARGNSRFAWMTRKSE | |
| | ETITPWNFEEVVDKGASAQSFIERMTNFDKNLPNEKVLPKHSLLYEYFTVYNELTKVKYVTEGMRKPA | |
| | FLSGEQKKAIVDLLFKTNRKVTVKQLKEDYFKKIECFDSVEISGVEDRFNASLGTYHDLLKIIKDKDF | |
| | LDNEENEDILEDIVLTLTLFEDREMIEERLKTYAHLFDDKVMKQLKRRRYTGWGRLSRKLINGIRDKQ | |
| | SGKTILDFLKSDGFANRNFMQLIHDDSLTFKEDIQKAQVSGQGDSLHEHIANLAGSPAIKKGILQTVK | |
| | VVDELVKVMGRHKPENIVIEMARENQTTQKGQKNSRERMKRIEEGIKELGSQILKEHPVENTQLQNEK | |
| | LYLYYLQNGRDMYVDQELDINRLSDYDVDHIVPQSFLKDDSIDNKVLTRSDKNRGKSDNVPSEEVVKK | |
| | MKNYWRQLLNAKLITQRKFDNLTKAERGGLSELDKAGFIKRQLVETRQITKHVAQILDSRMNTKYDEN | |
| | DKLIREVKVITLKSKLVSDFRKDFQFYKVREINNYHHAHDAYLNAVVGTALIKKYPKLESEFVYGDYK | |
| | VYDVRKMIAKSEQEIGKATAKYFFYSNIMNFFKTEITLANGEIRKRPLIETNGETGEIVWDKGRDFAT | |
| | VRKVLSMPQVNIVKKTEVQTGGFSKESIRPKRNSDKLIARKKDWDPKKYGGFVSPTVAYSVLVVAKVE | |
| | KGKSKKLKSVKELLGITIMERSSFEKNPIDFLEAKGYKEVKKDLIIKLPKYSLFELENGRKRMLASAR | |
| | FLQKGNELALPSKYVNFLYLASHYEKLKGSPEDNEQKQLFVEQHKHYLDEIIEQISEFSKRVILADAN | |
| | LDKVLSAYNKHRDKPIREQAENIIHLFTLTNLGAPRAFKYFDTTIDRKVYRSTKEVLDATLIHQSITG | |
| | LYETRIDLSQLGGDSGGSGGSGGSTNLSDIIEKETGKQLVIQESILMLPEEVEEVIGNKPESDILVHT | |
| | AYDESTDENVMLLTSDAPEYKPWALVIQDSNGENKIKMLSGGSGGSGGSTNLSDIIEKETGKQLVIQE | |
| | SILMLPEEVEEVIGNKPESDILVHTAYDESTDENVMLLTSDAPEYKPWALVIQDSNGENKIKMLSGGS | |
| | KRTADGSEFEPKKKRKV | |
| EE-SpCas9-NG | MKRTADGSEFESPKKKRKVSSETGPVAVDPTLRRRIEPHEFEVFFDPRELRKETCLLYEINWGGRHSI | 242 |
| base editor | WRHTSQNTNKHVEVNFIEKFTTERYFCPNTRCSITWFLSWSPCGECSRAITEFLSRYPHVTLFIYIAR | |
| | LYHHADPENRQGLEDLISSGVTIQIMTEQESGYCWRNFVNYSPSNEAHWPRYPHLWVRLYVLELYCII | |
| | LGLPPCLNILRRKQPQLTFFTIALQSCHYQRLPPHILWATGLKSGGSSGGSSGSETPGTSESATPESS | |
| | GGSSGGSDKKYSIGLAIGTNSVGWAVITDEYKVPSKKFKVLGNTDRHSIKKNLIGALLFDSGETAEAT | |
| | RLKRTARRRYTRRKNRICYLQEIFSNEMAKVDDSFFHRLEESFLVEEDKKHERHPIFGNIVDEVAYHE | |
| | KYPTIYHLRKKLVDSTDKADLRLIYLALAHMIKFRGHFLIEGDLNPDNSDVDKLFIQLVQTYNQLFEE | |
| | NPINASGVDAKAILSARLSKSRRLENLIAQLPGEKKNGLFGNLIALSLGLTPNFKSNFDLAEDAKLQL | |
| | SKDTYDDDLDNLLAQIGDQYADLFLAAKNLSDAILLSDILRVNTEITKAPLSASMIKRYDEHHQDLTL | |
| | LKALVRQQLPEKYKEIFFDQSKNGYAGYIDGGASQEEFYKFIKPILEKMDGTEELLVKLNREDLLRKQ | |
| | RTFDNGSIPHQIHLGELHAILRRQEDFYPFLKDNREKIEKILTFRIPYYVGPLARGNSRFAWMTRKSE | |
| | ETITPWNFEEVVDKGASAQSFIERMTNFDKNLPNEKVLPKHSLLYEYFTVYNELTKVKYVTEGMRKPA | |
| | FLSGEQKKAIVDLLFKTNRKVTVKQLKEDYFKKIECFDSVEISGVEDRFNASLGTYHDLLKIIKDKDF | |
| | LDNEENEDILEDIVLTLTLFEDREMIEERLKTYAHLFDDKVMKQLKRRRYTGWGRLSRKLINGIRDKQ | |
| | SGKTILDFLKSDGFANRNFMQLIHDDSLTFKEDIQKAQVSGQGDSLHEHIANLAGSPAIKKGILQTVK | |
| | VVDELVKVMGRHKPENIVIEMARENQTTQKGQKNSRERMKRIEEGIKELGSQILKEHPVENTQLQNEK | |
| | LYLYYLQNGRDMYVDQELDINRLSDYDVDHIVPQSFLKDDSIDNKVLTRSDKNRGKSDNVPSEEVVKK | |
| | MKNYWRQLLNAKLITQRKFDNLTKAERGGLSELDKAGFIKRQLVETRQITKHVAQILDSRMNTKYDEN | |
| | DKLIREVKVITLKSKLVSDFRKDFQFYKVREINNYHHAHDAYLNAVVGTALIKKYPKLESEFVYGDYK | |
| | VYDVRKMIAKSEQEIGKATAKYFFYSNIMNFFKTEITLANGEIRKRPLIETNGETGEIVWDKGRDFAT | |
| | VRKVLSMPQVNIVKKTEVQTGGFSKESIRPKRNSDKLIARKKDWDPKKYGGFVSPTVAYSVLVVAKVE | |
| | KGKSKKLKSVKELLGITIMERSSFEKNPIDFLEAKGYKEVKKDLIIKLPKYSLFELENGRKRMLASAR | |
| | FLQKGNELALPSKYVNFLYLASHYEKLKGSPEDNEQKQLFVEQHKHYLDEIIEQISEFSKRVILADAN | |
| | LDKVLSAYNKHRDKPIREQAENIIHLFTLTNLGAPRAFKYFDTTIDRKVYRSTKEVLDATLIHQSITG | |
| | LYETRIDLSQLGGDSGGSGGSGGSTNLSDIIEKETGKQLVIQESILMLPEEVEEVIGNKPESDILVHT | |
| | AYDESTDENVMLLTSDAPEYKPWALVIQDSNGENKIKMLSGGSGGSGGSTNLSDIIEKETGKQLVIQE | |
| | SILMLPEEVEEVIGNKPESDILVHTAYDESTDENVMLLTSDAPEYKPWALVIQDSNGENKIKMLSGGS | |
| | KRTADGSEFEPKKKRKV | |
| R33A + K34A- | MKRTADGSEFESPKKKRKVSSETGPVAVDPTLRRRIEPHEFEVFFDPRELAAETCLLYEINWGGRHSI | 243 |
| SpCas9-NG base | WRHTSQNTNKHVEVNFIEKFTTERYFCPNTRCSITWFLSWSPCGECSRAITEFLSRYPHVTLFIYIAR | |
| editor | LYHHADPRNRQGLRDLISSGVTIQIMTEQESGYCWRNFVNYSPSNEAHWPRYPHLWVRLYVLELYCII | |
| | LGLPPCLNILRRKQPQLTFFTIALQSCHYQRLPPHILWATGLKSGGSSGGSSGSETPGTSESATPESS | |
| | GGSSGGSDKKYSIGLAIGTNSVGWAVITDEYKVPSKKFKVLGNTDRHSIKKNLIGALLFDSGETAEAT | |
| | RLKRTARRRYTRRKNRICYLQEIFSNEMAKVDDSFFHRLEESFLVEEDKKHERHPIFGNIVDEVAYHE | |
| | KYPTIYHLRKKLVDSTDKADLRLIYLALAHMIKFRGHFLIEGDLNPDNSDVDKLFIQLVQTYNQLFEE | |
| | NPINASGVDAKAILSARLSKSRRLENLIAQLPGEKKNGLFGNLIALSLGLTPNFKSNFDLAEDAKLQL | |
| | SKDTYDDDLDNLLAQIGDQYADLFLAAKNLSDAILLSDILRVNTEITKAPLSASMIKRYDEHHQDLTL | |
| | LKALVRQQLPEKYKEIFFDQSKNGYAGYIDGGASQEEFYKFIKPILEKMDGTEELLVKLNREDLLRKQ | |
| | RTFDNGSIPHQIHLGELHAILRRQEDFYPFLKDNREKIEKILTFRIPYYVGPLARGNSRFAWMTRKSE | |
| | ETITPWNFEEVVDKGASAQSFIERMTNFDKNLPNEKVLPKHSLLYEYFTVYNELTKVKYVTEGMRKPA | |
| | FLSGEQKKAIVDLLFKTNRKVTVKQLKEDYFKKIECFDSVEISGVEDRFNASLGTYHDLLKIIKDKDF | |
| | LDNEENEDILEDIVLTLTLFEDREMIEERLKTYAHLFDDKVMKQLKRRRYTGWGRLSRKLINGIRDKQ | |
| | SGKTILDFLKSDGFANRNFMQLIHDDSLTFKEDIQKAQVSGQGDSLHEHIANLAGSPAIKKGILQTVK | |
| | VVDELVKVMGRHKPENIVIEMARENQTTQKGQKNSRERMKRIEEGIKELGSQILKEHPVENTQLQNEK | |
| | LYLYYLQNGRDMYVDQELDINRLSDYDVDHIVPQSFLKDDSIDNKVLTRSDKNRGKSDNVPSEEVVKK | |
| | MKNYWRQLLNAKLITQRKFDNLTKAERGGLSELDKAGFIKRQLVETRQITKHVAQILDSRMNTKYDEN | |
| | DKLIREVKVITLKSKLVSDFRKDFQFYKVREINNYHHAHDAYLNAVVGTALIKKYPKLESEFVYGDYK | |
| | VYDVRKMIAKSEQEIGKATAKYFFYSNIMNFFKTEITLANGEIRKRPLIETNGETGEIVWDKGRDFAT | |
| | VRKVLSMPQVNIVKKTEVQTGGFSKESIRPKRNSDKLIARKKDWDPKKYGGFVSPTVAYSVLVVAKVE | |
| | KGKSKKLKSVKELLGITIMERSSFEKNPIDFLEAKGYKEVKKDLIIKLPKYSLFELENGRKRMLASAR | |
| | FLQKGNELALPSKYVNFLYLASHYEKLKGSPEDNEQKQLFVEQHKHYLDEIIEQISEFSKRVILADAN | |
| | LDKVLSAYNKHRDKPIREQAENIIHLFTLTNLGAPRAFKYFDTTIDRKVYRSTKEVLDATLIHQSITG | |
| | LYETRIDLSQLGGDSGGSGGSGGSTNLSDIIEKETGKQLVIQESILMLPEEVEEVIGNKPESDILVHT | |
| | AYDESTDENVMLLTSDAPEYKPWALVIQDSNGENKIKMLSGGSGGSGGSTNLSDIIEKETGKQLVIQE | |
| | SILMLPEEVEEVIGNKPESDILVHTAYDESTDENVMLLTSDAPEYKPWALVIQDSNGENKIKMLSGGS | |
| | KRTADGSEFEPKKKRKV | |
| YE1-CP1028 | MKRTADGSEFESPKKKRKVSSETGPVAVDPTLRRRIEPHEFEVFFDPRELRKETCLLYEINWGGRHSI | 244 |
| base editor | WRHTSQNTNKHVEVNFIEKFTTERYFCPNTRCSITWFLSYSPCGECSRAITEFLSRYPHVTLFIYIAR | |
| (YE1-BE4- | LYHHADPENRQGLRDLISSGVTIQIMTEQESGYCWRNFVNYSPSNEAHWPRYPHLWVRLYVLELYCII | |
| CP1028, or | LGLPPCLNILRRKQPQLTFFTIALQSCHYQRLPPHILWATGLKSGGSSGGSSGSETPGTSESATPESS | |
| YE1-CP) | GGSSGGSEIGKATAKYFFYSNIMNFFKTEITLANGEIRKRPLIETNGETGEIVWDKGRDFATVRKVLS | |
| | MPQVNIVKKTEVQTGGFSKESILPKRNSDKLIARKKDWDPKKYGGFDSPTVAYSVLVVAKVEKGKSKK | |
| | LKSVKELLGITIMERSSFEKNPIDFLEAKGYKEVKKDLIIKLPKYSLFELENGRKRMLASAGELQKGN | |
| | ELALPSKYVNFLYLASHYEKLKGSPEDNEQKQLFVEQHKHYLDEIIEQISEFSKRVILADANLDKVLS | |
| | AYNKHRDKPIREQAENIIHLFTLTNLGAPAAFKYFDTTIDRKRYTSTKEVLDATLIHQSITGLYETRI | |
| | DLSQLGGDGGSGGSGGSGGSGGSGGSGGMDKKYSIGLAIGTNSVGWAVITDEYKVPSKKFKVLGNTDR | |
| | HSIKKNLIGALLFDSGETAEATRLKRTARRRYTRRKNRICYLQEIFSNEMAKVDDSFFHRLEESFLVE | |
| | EDKKHERHPIFGNIVDEVAYHEKYPTIYHLRKKLVDSTDKADLRLIYLALAHMIKFRGHFLIEGDLNP | |
| | DNSDVDKLFIQLVQTYNQLFEENPINASGVDAKAILSARLSKSRRLENLIAQLPGEKKNGLFGNLIAL | |
| | SLGLTPNFKSNFDLAEDAKLQLSKDTYDDDLDNLLAQIGDQYADLFLAAKNLSDAILLSDILRVNTEI | |
| | TKAPLSASMIKRYDEHHQDLTLLKALVRQQLPEKYKEIFFDQSKNGYAGYIDGGASQEEFYKFIKPIL | |
| | EKMDGTEELLVKLNREDLLRKQRTFDNGSIPHQIHLGELHAILRRQEDFYPFLKDNREKIEKILTFRI | |
| | PYYVGPLARGNSRFAWMTRKSEETITPWNFEEVVDKGASAQSFIERMTNFDKNLPNEKVLPKHSLLYE | |
| | YFTVYNELTKVKYVTEGMRKPAFLSGEQKKAIVDLLFKTNRKVTVKQLKEDYFKKIECFDSVEISGVE | |
| | DRFNASLGTYHDLLKIIKDKDFLDNEENEDILEDIVLTLTLFEDREMIEERLKTYAHLFDDKVMKQLK | |
| | RRRYTGWGRLSRKLINGIRDKQSGKTILDFLKSDGFANRNFMQLIHDDSLTFKEDIQKAQVSGQGDSL | |
| | HEHIANLAGSPAIKKGILQTVKVVDELVKVMGRHKPENIVIEMARENQTTQKGQKNSRERMKRIEEGI | |
| | KELGSQILKEHPVENTQLQNEKLYLYYLQNGRDMYVDQELDINRLSDYDVDHIVPQSFLKDDSIDNKV | |
| | LTRSDKNRGKSDNVPSEEVVKKMKNYWRQLLNAKLITQRKFDNLTKAERGGLSELDKAGFIKRQLVET | |
| | RQITKHVAQILDSRMNTKYDENDKLIREVKVITLKSKLVSDFRKDFQFYKVREINNYHHAHDAYLNAV | |
| | VGTALIKKYPKLESEFVYGDYKVYDVRKMIAKSEQSGGSGGSGGSTNLSDIIEKETGKQLVIQESILM | |
| | LPEEVEEVIGNKPESDILVHTAYDESTDENVMLLTSDAPEYKPWALVIQDSNGENKIKMLSGGSGGSG | |
| | GSTNLSDIIEKETGKQLVIQESILMLPEEVEEVIGNKPESDILVHTAYDESTDENVMLLTSDAPEYKP | |
| | WALVIQDSNGENKIKMLSGGSKRTADGSEFEPKKKRKV | |
| YE2-CP1028 | MKRTADGSEFESPKKKRKVSSETGPVAVDPTLRRRIEPHEFEVFFDPRELRKETCLLYEINWGGRHSI | 245 |
| base editor | WRHTSQNTNKHVEVNFIEKFTTERYFCPNTRCSITWFLSYSPCGECSRAITEFLSRYPHVTLFIYIAR | |
| (YE2-BE4- | LYHHADPRNRQGLEDLISSGVTIQIMTEQESGYCWRNFVNYSPSNEAHWPRYPHLWVRLYVLELYCII | |
| CP1028) | LGLPPCLNILRRKQPQLTFFTIALQSCHYQRLPPHILWATGLKSGGSSGGSSGSETPGTSESATPESS | |
| | GGSSGGSEIGKATAKYFFYSNIMNFFKTEITLANGEIRKRPLIETNGETGEIVWDKGRDFATVRKVLS | |
| | MPQVNIVKKTEVQTGGFSKESILPKRNSDKLIARKKDWDPKKYGGFDSPTVAYSVLVVAKVEKGKSKK | |
| | LKSVKELLGITIMERSSFEKNPIDFLEAKGYKEVKKDLIIKLPKYSLFELENGRKRMLASAGELQKGN | |
| | ELALPSKYVNFLYLASHYEKLKGSPEDNEQKQLFVEQHKHYLDEIIEQISEFSKRVILADANLDKVLS | |
| | AYNKHRDKPIREQAENIIHLFTLTNLGAPAAFKYFDTTIDRKRYTSTKEVLDATLIHQSITGLYETRI | |
| | DLSQLGGDGGSGGSGGSGGSGGSGGSGGMDKKYSIGLAIGTNSVGWAVITDEYKVPSKKFKVLGNTDR | |
| | HSIKKNLIGALLFDSGETAEATRLKRTARRRYTRRKNRICYLQEIFSNEMAKVDDSFFHRLEESFLVE | |
| | EDKKHERHPIFGNIVDEVAYHEKYPTIYHLRKKLVDSTDKADLRLIYLALAHMIKFRGHFLIEGDLNP | |
| | DNSDVDKLFIQLVQTYNQLFEENPINASGVDAKAILSARLSKSRRLENLIAQLPGEKKNGLFGNLIAL | |
| | SLGLTPNFKSNFDLAEDAKLQLSKDTYDDDLDNLLAQIGDQYADLFLAAKNLSDAILLSDILRVNTEI | |
| | TKAPLSASMIKRYDEHHQDLTLLKALVRQQLPEKYKEIFFDQSKNGYAGYIDGGASQEEFYKFIKPIL | |
| | EKMDGTEELLVKLNREDLLRKQRTFDNGSIPHQIHLGELHAILRRQEDFYPFLKDNREKIEKILTFRI | |
| | PYYVGPLARGNSRFAWMTRKSEETITPWNFEEVVDKGASAQSFIERMTNFDKNLPNEKVLPKHSLLYE | |
| | YFTVYNELTKVKYVTEGMRKPAFLSGEQKKAIVDLLFKTNRKVTVKQLKEDYFKKIECFDSVEISGVE | |
| | DRFNASLGTYHDLLKIIKDKDFLDNEENEDILEDIVLTLTLFEDREMIEERLKTYAHLFDDKVMKQLK | |
| | RRRYTGWGRLSRKLINGIRDKQSGKTILDFLKSDGFANRNFMQLIHDDSLTFKEDIQKAQVSGQGDSL | |
| | HEHIANLAGSPAIKKGILQTVKVVDELVKVMGRHKPENIVIEMARENQTTQKGQKNSRERMKRIEEGI | |
| | KELGSQILKEHPVENTQLQNEKLYLYYLQNGRDMYVDQELDINRLSDYDVDHIVPQSFLKDDSIDNKV | |
| | LTRSDKNRGKSDNVPSEEVVKKMKNYWRQLLNAKLITQRKFDNLTKAERGGLSELDKAGFIKRQLVET | |
| | RQITKHVAQILDSRMNTKYDENDKLIREVKVITLKSKLVSDFRKDFQFYKVREINNYHHAHDAYLNAV | |
| | VGTALIKKYPKLESEFVYGDYKVYDVRKMIAKSEQSGGSGGSGGSTNLSDIIEKETGKQLVIQESILM | |
| | LPEEVEEVIGNKPESDILVHTAYDESTDENVMLLTSDAPEYKPWALVIQDSNGENKIKMLSGGSGGSG | |
| | GSTNLSDIIEKETGKQLVIQESILMLPEEVEEVIGNKPESDILVHTAYDESTDENVMLLTSDAPEYKP | |
| | WALVIQDSNGENKIKMLSGGSKRTADGSEFEPKKKRKV | |
| YEE-CP1028 | MKRTADGSEFESPKKKRKVSSETGPVAVDPTLRRRIEPHEFEVFFDPRELRKETCLLYEINWGGRHSI | 246 |
| base editor | WRHTSQNTNKHVEVNFIEKFTTERYFCPNTRCSITWFLSYSPCGECSRAITEFLSRYPHVTLFIYIAR | |
| (YEE-BE4- | LYHHADPENRQGLEDLISSGVTIQIMTEQESGYCWRNFVNYSPSNEAHWPRYPHLWVRLYVLELYCII | |
| CP1028) | LGLPPCLNILRRKQPQLTFFTIALQSCHYQRLPPHILWATGLKSGGSSGGSSGSETPGTSESATPESS | |
| | GGSSGGSEIGKATAKYFFYSNIMNFFKTEITLANGEIRKRPLIETNGETGEIVWDKGRDFATVRKVLS | |
| | MPQVNIVKKTEVQTGGFSKESILPKRNSDKLIARKKDWDPKKYGGFDSPTVAYSVLVVAKVEKGKSKK | |
| | LKSVKELLGITIMERSSFEKNPIDFLEAKGYKEVKKDLIIKLPKYSLFELENGRKRMLASAGELQKGN | |
| | ELALPSKYVNFLYLASHYEKLKGSPEDNEQKQLFVEQHKHYLDEIIEQISEFSKRVILADANLDKVLS | |
| | AYNKHRDKPIREQAENIIHLFTLTNLGAPAAFKYFDTTIDRKRYTSTKEVLDATLIHQSITGLYETRI | |
| | DLSQLGGDGGSGGSGGSGGSGGSGGSGGMDKKYSIGLAIGTNSVGWAVITDEYKVPSKKFKVLGNTDR | |
| | HSIKKNLIGALLFDSGETAEATRLKRTARRRYTRRKNRICYLQEIFSNEMAKVDDSFFHRLEESFLVE | |
| | EDKKHERHPIFGNIVDEVAYHEKYPTIYHLRKKLVDSTDKADLRLIYLALAHMIKFRGHFLIEGDLNP | |
| | DNSDVDKLFIQLVQTYNQLFEENPINASGVDAKAILSARLSKSRRLENLIAQLPGEKKNGLFGNLIAL | |
| | SLGLTPNFKSNFDLAEDAKLQLSKDTYDDDLDNLLAQIGDQYADLFLAAKNLSDAILLSDILRVNTEI | |
| | TKAPLSASMIKRYDEHHQDLTLLKALVRQQLPEKYKEIFFDQSKNGYAGYIDGGASQEEFYKFIKPIL | |
| | EKMDGTEELLVKLNREDLLRKQRTFDNGSIPHQIHLGELHAILRRQEDFYPFLKDNREKIEKILTFRI | |
| | PYYVGPLARGNSRFAWMTRKSEETITPWNFEEVVDKGASAQSFIERMTNFDKNLPNEKVLPKHSLLYE | |
| | YFTVYNELTKVKYVTEGMRKPAFLSGEQKKAIVDLLFKTNRKVTVKQLKEDYFKKIECFDSVEISGVE | |
| | DRFNASLGTYHDLLKIIKDKDFLDNEENEDILEDIVLTLTLFEDREMIEERLKTYAHLFDDKVMKQLK | |
| | RRRYTGWGRLSRKLINGIRDKQSGKTILDFLKSDGFANRNFMQLIHDDSLTFKEDIQKAQVSGQGDSL | |
| | HEHIANLAGSPAIKKGILQTVKVVDELVKVMGRHKPENIVIEMARENQTTQKGQKNSRERMKRIEEGI | |
| | KELGSQILKEHPVENTQLQNEKLYLYYLQNGRDMYVDQELDINRLSDYDVDHIVPQSFLKDDSIDNKV | |
| | LTRSDKNRGKSDNVPSEEVVKKMKNYWRQLLNAKLITQRKFDNLTKAERGGLSELDKAGFIKRQLVET | |
| | RQITKHVAQILDSRMNTKYDENDKLIREVKVITLKSKLVSDFRKDFQFYKVREINNYHHAHDAYLNAV | |
| | VGTALIKKYPKLESEFVYGDYKVYDVRKMIAKSEQSGGSGGSGGSTNLSDIIEKETGKQLVIQESILM | |
| | LPEEVEEVIGNKPESDILVHTAYDESTDENVMLLTSDAPEYKPWALVIQDSNGENKIKMLSGGSGGSG | |
| | GSTNLSDIIEKETGKQLVIQESILMLPEEVEEVIGNKPESDILVHTAYDESTDENVMLLTSDAPEYKP | |
| | WALVIQDSNGENKIKMLSGGSKRTADGSEFEPKKKRKV | |
| EE-CP1028 base | MKRTADGSEFESPKKKRKVSSETGPVAVDPTLRRRIEPHEFEVFFDPRELRKETCLLYEINWGGRHSI | 247 |
| editor (EE- | WRHTSQNTNKHVEVNFIEKFTTERYFCPNTRCSITWFLSWSPCGECSRAITEFLSRYPHVTLFIYIAR | |
| BE4-CP1028) | LYHHADPENRQGLEDLISSGVTIQIMTEQESGYCWRNFVNYSPSNEAHWPRYPHLWVRLYVLELYCII | |
| | LGLPPCLNILRRKQPQLTFFTIALQSCHYQRLPPHILWATGLKSGGSSGGSSGSETPGTSESATPESS | |
| | GGSSGGSEIGKATAKYFFYSNIMNFFKTEITLANGEIRKRPLIETNGETGEIVWDKGRDFATVRKVLS | |
| | MPQVNIVKKTEVQTGGFSKESILPKRNSDKLIARKKDWDPKKYGGFDSPTVAYSVLVVAKVEKGKSKK | |
| | LKSVKELLGITIMERSSFEKNPIDFLEAKGYKEVKKDLIIKLPKYSLFELENGRKRMLASAGELQKGN | |
| | ELALPSKYVNFLYLASHYEKLKGSPEDNEQKQLFVEQHKHYLDEIIEQISEFSKRVILADANLDKVLS | |
| | AYNKHRDKPIREQAENIIHLFTLTNLGAPAAFKYFDTTIDRKRYTSTKEVLDATLIHQSITGLYETRI | |
| | DLSQLGGDGGSGGSGGSGGSGGSGGSGGMDKKYSIGLAIGTNSVGWAVITDEYKVPSKKFKVLGNTDR | |
| | HSIKKNLIGALLFDSGETAEATRLKRTARRRYTRRKNRICYLQEIFSNEMAKVDDSFFHRLEESFLVE | |
| | EDKKHERHPIFGNIVDEVAYHEKYPTIYHLRKKLVDSTDKADLRLIYLALAHMIKFRGHFLIEGDLNP | |
| | DNSDVDKLFIQLVQTYNQLFEENPINASGVDAKAILSARLSKSRRLENLIAQLPGEKKNGLFGNLIAL | |
| | SLGLTPNFKSNFDLAEDAKLQLSKDTYDDDLDNLLAQIGDQYADLFLAAKNLSDAILLSDILRVNTEI | |
| | TKAPLSASMIKRYDEHHQDLTLLKALVRQQLPEKYKEIFFDQSKNGYAGYIDGGASQEEFYKFIKPIL | |
| | EKMDGTEELLVKLNREDLLRKQRTFDNGSIPHQIHLGELHAILRRQEDFYPFLKDNREKIEKILTFRI | |
| | PYYVGPLARGNSRFAWMTRKSEETITPWNFEEVVDKGASAQSFIERMTNFDKNLPNEKVLPKHSLLYE | |
| | YFTVYNELTKVKYVTEGMRKPAFLSGEQKKAIVDLLFKTNRKVTVKQLKEDYFKKIECFDSVEISGVE | |
| | DRFNASLGTYHDLLKIIKDKDFLDNEENEDILEDIVLTLTLFEDREMIEERLKTYAHLFDDKVMKQLK | |
| | RRRYTGWGRLSRKLINGIRDKQSGKTILDFLKSDGFANRNFMQLIHDDSLTFKEDIQKAQVSGQGDSL | |
| | HEHIANLAGSPAIKKGILQTVKVVDELVKVMGRHKPENIVIEMARENQTTQKGQKNSRERMKRIEEGI | |
| | KELGSQILKEHPVENTQLQNEKLYLYYLQNGRDMYVDQELDINRLSDYDVDHIVPQSFLKDDSIDNKV | |
| | LTRSDKNRGKSDNVPSEEVVKKMKNYWRQLLNAKLITQRKFDNLTKAERGGLSELDKAGFIKRQLVET | |
| | RQITKHVAQILDSRMNTKYDENDKLIREVKVITLKSKLVSDFRKDFQFYKVREINNYHHAHDAYLNAV | |
| | VGTALIKKYPKLESEFVYGDYKVYDVRKMIAKSEQSGGSGGSGGSTNLSDIIEKETGKQLVIQESILM | |
| | LPEEVEEVIGNKPESDILVHTAYDESTDENVMLLTSDAPEYKPWALVIQDSNGENKIKMLSGGSGGSG | |
| | GSTNLSDIIEKETGKQLVIQESILMLPEEVEEVIGNKPESDILVHTAYDESTDENVMLLTSDAPEYKP | |
| | WALVIQDSNGENKIKMLSGGSKRTADGSEFEPKKKRKV | |
| R33A + K34A- | MKRTADGSEFESPKKKRKVSSETGPVAVDPTLRRRIEPHEFEVFFDPRELAAETCLLYEINWGGRHSI | 248 |
| CP1028 base | WRHTSQNTNKHVEVNFIEKFTTERYFCPNTRCSITWFLSWSPCGECSRAITEFLSRYPHVTLFIYIAR | |
| editor | LYHHADPRNRQGLRDLISSGVTIQIMTEQESGYCWRNFVNYSPSNEAHWPRYPHLWVRLYVLELYCII | |
| (R33A + K34A- | LGLPPCLNILRRKQPQLTFFTIALQSCHYQRLPPHILWATGLKSGGSSGGSSGSETPGTSESATPESS | |
| BE4-CP1028) | GGSSGGSEIGKATAKYFFYSNIMNFFKTEITLANGEIRKRPLIETNGETGEIVWDKGRDFATVRKVLS | |
| | MPQVNIVKKTEVQTGGFSKESILPKRNSDKLIARKKDWDPKKYGGFDSPTVAYSVLVVAKVEKGKSKK | |
| | LKSVKELLGITIMERSSFEKNPIDFLEAKGYKEVKKDLIIKLPKYSLFELENGRKRMLASAGELQKGN | |
| | ELALPSKYVNFLYLASHYEKLKGSPEDNEQKQLFVEQHKHYLDEIIEQISEFSKRVILADANLDKVLS | |
| | AYNKHRDKPIREQAENIIHLFTLTNLGAPAAFKYFDTTIDRKRYTSTKEVLDATLIHQSITGLYETRI | |
| | DLSQLGGDGGSGGSGGSGGSGGSGGSGGMDKKYSIGLAIGTNSVGWAVITDEYKVPSKKFKVLGNTDR | |
| | HSIKKNLIGALLFDSGETAEATRLKRTARRRYTRRKNRICYLQEIFSNEMAKVDDSFFHRLEESFLVE | |
| | EDKKHERHPIFGNIVDEVAYHEKYPTIYHLRKKLVDSTDKADLRLIYLALAHMIKFRGHFLIEGDLNP | |
| | DNSDVDKLFIQLVQTYNQLFEENPINASGVDAKAILSARLSKSRRLENLIAQLPGEKKNGLFGNLIAL | |
| | SLGLTPNFKSNFDLAEDAKLQLSKDTYDDDLDNLLAQIGDQYADLFLAAKNLSDAILLSDILRVNTEI | |
| | TKAPLSASMIKRYDEHHQDLTLLKALVRQQLPEKYKEIFFDQSKNGYAGYIDGGASQEEFYKFIKPIL | |
| | EKMDGTEELLVKLNREDLLRKQRTFDNGSIPHQIHLGELHAILRRQEDFYPFLKDNREKIEKILTFRI | |
| | PYYVGPLARGNSRFAWMTRKSEETITPWNFEEVVDKGASAQSFIERMTNFDKNLPNEKVLPKHSLLYE | |
| | YFTVYNELTKVKYVTEGMRKPAFLSGEQKKAIVDLLFKTNRKVTVKQLKEDYFKKIECFDSVEISGVE | |
| | DRFNASLGTYHDLLKIIKDKDFLDNEENEDILEDIVLTLTLFEDREMIEERLKTYAHLFDDKVMKQLK | |
| | RRRYTGWGRLSRKLINGIRDKQSGKTILDFLKSDGFANRNFMQLIHDDSLTFKEDIQKAQVSGQGDSL | |
| | HEHIANLAGSPAIKKGILQTVKVVDELVKVMGRHKPENIVIEMARENQTTQKGQKNSRERMKRIEEGI | |
| | KELGSQILKEHPVENTQLQNEKLYLYYLQNGRDMYVDQELDINRLSDYDVDHIVPQSFLKDDSIDNKV | |
| | LTRSDKNRGKSDNVPSEEVVKKMKNYWRQLLNAKLITQRKFDNLTKAERGGLSELDKAGFIKRQLVET | |
| | RQITKHVAQILDSRMNTKYDENDKLIREVKVITLKSKLVSDFRKDFQFYKVREINNYHHAHDAYLNAV | |
| | VGTALIKKYPKLESEFVYGDYKVYDVRKMIAKSEQSGGSGGSGGSTNLSDIIEKETGKQLVIQESILM | |
| | LPEEVEEVIGNKPESDILVHTAYDESTDENVMLLTSDAPEYKPWALVIQDSNGENKIKMLSGGSGGSG | |
| | GSTNLSDIIEKETGKQLVIQESILMLPEEVEEVIGNKPESDILVHTAYDESTDENVMLLTSDAPEYKP | |
| | WALVIQDSNGENKIKMLSGGSKRTADGSEFEPKKKRKV | |

guide RNAs and target DNA sequences

| | | SEQ ID |
|---|---|---|
| DESCRIPTION | SEQUENCE | NO: |
| Portion of | GGTTTCAGACAAAATCAAAAAGAAGGAAGGTGCTCACATTCCTTAAATTAA | 249 |
| SMN2 gene with | | |
| C840 residue | | |
| in bold within | | |
| position 6 of | | |
| exon 7 (active | | |
| splice site) | | |
| | AUUUUGUCUAAAACCCUGUA | 250 |
| | GGTTTTAGACAAAATCAAAAAGAAGGAAGGTGCTCACATTCCTTAAATTAA | 251 |
| Portion of | ATTTTCCTTACAGGGTTTTA | 252 |
| SMN2 gene with | | |
| C840T mutation | | |
| in bold within | | |
| position 6 of | | |
| exon 7 | | |
| SMN2 | TTTCCTTACAGGGTTTTAGA | 253 |
| SMN2 | TTCCTTACAGGGTTTTAGAC | 254 |
| SMN2 | TCCTTACAGGGTTTTAGACA | 255 |
| SMN2 | CCTTACAGGGTTTTAGACAA | 256 |
| SMN2 | CTTACAGGGTTTTAGACAAA | 257 |
| SMN2 | TTACAGGGTTTTAGACAAAA | 258 |
| SMN2 | TACAGGGTTTTAGACAAAAT | 259 |
| SMN2 | ACAGGGTTTTAGACAAAATC | 260 |
| SMN2 | GTTTTAGACAAAATC | 261 |
| SMN2 | GGTTTTAGACAAAATCA | 262 |
| SMN2 | GGGTTTTAGACAAAATCAA | 263 |
| SMN2 | AGGGTTTTAGACAAAATCAAA | 264 |
| SMN2 | CAGGGTTTTAGACAAAATCAAAA | 265 |
| SMN2 | ACAGGGTTTTAGACAAAATCAAAA | 266 |
| SMN2 | CATAGAGCAGCACTAAATG | 267 |
| SMN2 | ATAGAGCAGCACTAAATGA | 268 |
| SMN2 | TAGAGCAGCACTAAATGAC | 269 |
| SMN2 | AGAGCAGCACTAAATGACA | 270 |
| SMN2 | GAGCAGCACTAAATGACAC | 271 |
| SMN2 | AGCAGCACTAAATGACACC | 272 |
| SMN2 | GCAGCACTAAATGACACCA | 273 |
| SMN2 | CAGCACTAAATGACACCAT | 274 |
| SMN2 | AGCACTAAATGACACCATA | 275 |
| SMN2 | GCACTAAATGACACCATAA | 276 |
| SMN2 | TAAATGACACCATAA | 277 |
| SMN2 | CTAAATGACACCATAAA | 278 |
| SMN2 | ACTAAATGACACCATAAAG | 279 |
| SMN2 | CACTAAATGACACCATAAAGA | 280 |
| SMN2 | GCACTAAATGACACCATAAAGAA | 281 |
| SMN2 | AGCACTAAATGACACCATAAAGAAA | 282 |
| SMN2 | AATTTCATGGTACATGAGTG | 283 |
| SMN2 | TTTCATGGTACATGAGTGGC | 284 |
| SMN2 | TTCATGGTACATGAGTGGCT | 285 |
| SMN2 | TCATGGTACATGAGTGGCTA | 286 |
| SMN2 | CATGGTACATGAGTGGCTAT | 287 |
| SMN2 | ATGGTACATGAGTGGCTATC | 288 |
| SMN2 | TGGTACATGAGTGGCTATCA | 289 |
| SMN2 | GGTACATGAGTGGCTATCAT | 290 |
| SMN2 | GTACATGAGTGGCTATCATA | 291 |
| SMN2 | TGAGTGGCTATCATA | 292 |
| SMN2 | ATGAGTGGCTATCATAC | 293 |
| SMN2 | CATGAGTGGCTATCATACT | 294 |
| SMN2 | ACATGAGTGGCTATCATACTG | 295 |
| SMN2 | TACATGAGTGGCTATCATACTGG | 296 |
| SMN2 | TTTTCCTTACAGGGTTTTAG | 398 |
| SMN2 | ATTTCATGGTACATGAGTGG | 399 |
| guide | (1) | 297 |
| | NNNNNNNNgtttttgtactctcaagatttaGAAAtaaatcttgcagaagctacaaagataaggctt | |
| | catgccgaaatcaacaccctgtcattttatggcagggtgttttcgttatttaaTTTTTT | |
| guide | (2) | 298 |
| | NNNNNNNNNNNNNNNNNNgtttttgtactctcaGAAAtgcagaagctacaaagataaggcttcatgcc | |
| | gaaatca acaccctgtcattttatggcagggtgttttcgttatttaaTTTTTT | |
| guide | (3) | 299 |
| | NNNNNNNNNNNNNNNNNNNNgtttttgtactctcaGAAAtgcagaagctacaaagataaggcttcatg | |
| | ccgaaatca acaccctgtcattttatggcagggtgtTTTTT | |
| guide | (4) | 300 |
| | NNNNNNNNNNNNNNNNNNNNgttttagagctaGAAAtagcaagttaaaataaggctagtccgttatca | |
| | acttgaaaa agtggcaccgagtcggtgcTTTTTT | |
| guide | (5) | 301 |
| | NNNNNNNNNNNNNNNNNNNNgttttagagctaGAAATAGcaagttaaaataaggctagtccgttatca | |
| | acttgaa aaagtgTTTTTTT | |
| guide | (6) | 302 |
| | NNNNNNNNNNNNNNNNNNNNgttttagagctagAAATAGcaagttaaaataaggctagtccgttatca | |
| guide | GUUUUAGAGCUAGAAAUAGCAAGUUAAAAUAAAGGCUAGUCCGUUAUCAACUUGAAAAAGUGGCACCG | 303 |
| | AGUCGGUGCUUUUU | |
| guide | GUUUUAGAGCUAGAAAUAGCAAGUUAAAAUAAGGCUAGUCCGUUAUCAACUUGAAAAAGUGGCACCGA | 304 |
| | GUCGGUGCUUUUUUU | |
| guide | GGUCCACCCACCUGGGCUCCGUUUUAGAGCUAGAAAUAGCAAGUUAAAAUAAGGCUAGUCCGUUAUCA | 305 |
| | ACUUGAAAAAGUGGCACCGAGUCGGUGCUUUUUUU | |
| guide | AUUUUGUCUAAAACCCUGUAGUUUUAGAGCUAGAAAUAGCAAGUUAAAAUAAAGGCUAGUCCGUUAUC | 405 |
| | AACUUGAAAAAGUGGCACCGAGUCGGUGCUUUUU | |
| guide | AUUUUGUCUAAAACCCUGUAGUUUUAGAGCUAGAAAUAGCAAGUUAAAAUAAGGCUAGUCCGUUAUCA | 406 |
| | ACUUGAAAAAGUGGCACCGAGUCGGUGCUUUUUUU | |
| Exemplary | UUUUUGAUUUUGUCUAAAACCCUGUA | 306 |
| guide | | |
| sequences to | | |
| target a C840T | | |
| point mutation | | |
| in SMN2 | | |
| | UUUUGAUUUUGUCUAAAACCCUGUA | 307 |
| | UUUGAUUUUGUCUAAAACCCUGUA | 308 |
| | UUGAUUUUGUCUAAAACCCUGUA | 309 |
| | UGAUUUUGUCUAAAACCCUGUA | 310 |
| | GAUUUUGUCUAAAACCCUGUA | 311 |
| | AUUUUGUCUAAAACCCUGUA | 312 |
| | UUUUGUCUAAAACCCUGUA | 313 |
| | UUUGUCUAAAACCCUGUA | 314 |
| | UUGUCUAAAACCCUGUA | 315 |
| | UGUCUAAAACCCUGUA | 316 |
| | UUUGUCUAAAACCCUGUAAG | 317 |
| | UUUUGUCUAAAACCCUGUAA | 318 |
| | UGAUUUUGUCUAAAACCC | 319 |
| | GAUUUUGUCUAAAACCCU | 320 |
| | AUUUUGUCUAAAACCCUG | 321 |
| | GUCUAAAACCCUGUAAGG | 322 |
| | UCUAAAACCCUGUAAGGA | 323 |
| Exemplary | UUUGCAGGAAAUGCUGGCAU | 324 |
| guide | | |
| sequences to | | |
| target a stop | | |
| codon in exon | | |
| 8 of SMN2. | | |
| the A that is | | |
| complementary | | |
| to a stop | | |
| codon | | |
| comprising T | | |
| of exon 8 in | | |
| SMN2 is shown | | |
| in bold | | |
| | UUCUCAUUUGCAGGAAAUGC | 325 |
| | CAUUUAGUGCUGCUCUAUGC | 326 |
| | CAGGAAAUGCUGGCAUAGAG | 327 |
| | UUGCAGGAAAUGCUGGCAUA | 328 |
| | AUUUGCAGGAAAUGCUGGCA | 329 |
| Exemplary | UACAUGAGUGGCUAUCAUAC | 330 |
| guide | | |
| sequences to | | |
| target the | | |
| S270 amino | | |
| acid in exon 6 | | |
| of SMN2. | | |
| guide | UGAGCCGCUG | 400 |
| guide | UGAGCCGCUGG | 401 |
| guide | ATTTTGTCTAAAACCCTGTA | 331 |
| guide | AUUUUGUCUAAAACCcugua | 332 |
| guide | TTTGTCTAAAACCCTGTAAG | 333 |
| guide | TTTTGTCTAAAACCCTGTAA | 334 |
| guide | TGATTTTGTCTAAAACCC | 335 |
| guide | GATTTTGTCTAAAACCCT | 336 |
| guide | ATTTTGTCTAAAACCCTG | 337 |
| guide | GTCTAAAACCCTGTAAGG | 338 |
| guide | TCTAAAACCCTGTAAGGA | 339 |
| guide | UUUGUCUAAAACCCUGUAAG | 340 |
| guide | UUUUGUCUAAAACCCUGUAA | 341 |
| guide | UGAUUUUGUCUAAAACCC | 342 |
| guide | GAUUUUGUCUAAAACCCU | 343 |
| guide | AUUUUGUCUAAAACCCUG | 344 |
| guide | GUCUAAAACCCUGUAAGG | 345 |
| guide | UCUAAAACCCUGUAAGGA | 346 |
| guide | TTTGCAGGAAATGCTGGCAT | 347 |
| guide | TTCTCATTTGCAGGAAATGC | 348 |
| guide | CATTTAGTGCTGCTCTATGC | 349 |
| guide | CAGGAAATGCTGGCATAGAG | 350 |
| guide | TTGCAGGAAATGCTGGCATA | 351 |
| guide | ATTTGCAGGAAATGCTGGCA | 352 |
| guide | TGGCATAGAGCAGCACTAAA | 353 |
| guide | UUUGCAGGAAAUGCUGGCAU | 354 |
| guide | UUCUCAUUUGCAGGAAAUGC | 355 |
| guide | CAUUUAGUGCUGCUCUAUGC | 356 |
| guide | CAGGAAAUGCUGGCAUAGAG | 357 |
| guide | UUGCAGGAAAUGCUGGCAUA | 358 |
| guide | AUUUGCAGGAAAUGCUGGCA | 359 |
| guide | UGGCAUAGAGCAGCACUAAA | 360 |
| guide | TGGCATAGAGCAGCACTAAA | 361 |
| guide | UGGCAUAGAGCAGCACUAAA | 362 |
| genomic | Gtgaaacaaaatgctttttaacatccatataaagctatctatatatagctatctatatctatatagct | 363 |
| sequence of | attttttttaacttcctttattttccttacagGGTTTTAGACAAAATCAAAAAGAAGGAAGGTGCTCA | |
| the SMN2 exon | CATTCCTTAAATTAAggagtaagtctgccagcattatgaaagtgaatcttacttttgtaaaactttat | |
| 7 is presented | ggtttgtggaaaacaaatgtttttgaacatttaaaaagttcagatgt | |
| below (the | | |
| C→T mutation | | |
| is bolded and | | |
| underlined; | | |
| capitalization | | |
| represents the | | |
| exon) | | |
| Exon 7- | ATTTTGTCTAAAACCctgta | 364 |
| modifying | | |
| sgRNA (or | | |
| corresponding | | |
| DNA) | | |
| | AUUUUGUCUAAAACCcUgUa | 365 |
| | TTTGTCTAAAACCctgtaag | 366 |
| | UUUGUCUAAAACCcUgUaag | 367 |
| | TTTTGTCTAAAACCctgtaa | 368 |
| | UUUUGUCUAAAACCcUgUaa | 369 |
| | TGATTTTGTCTAAAACCC | 370 |
| | UGAUUUUGUCUAAAACCC | 371 |
| | GATTTTGTCTAAAACCCT | 372 |
| | GAUUUUGUCUAAAACCCU | 373 |
| | ATTTTGTCTAAAACCCTG | 374 |
| | AUUUUGUCUAAAACCCUG | 375 |
| | GTCTAAAACCCTGTAAGG | 376 |
| | GUCUAAAACCCUGUAAGG | 377 |
| | TCTAAAACCCTGTAAGGA | 378 |
| | UCUAAAACCCUGUAAGGA | 379 |
| Exon 8 | CtctggttctaatttctcatttgcagGAAATGCTGGCATAGAGCAGCACTAAATGACACCACTAAAGA | 380 |
| sequence (stop | AACGATCA | |
| codos are | | |
| bolded) | | |
| Exon 8- | TTTGCAGGAAATGCTGGCAT | 381 |
| modifying | | |
| sgRNAs | | |
| Exon 8- | UUUGCAGGAAAUGCUGGCAU | 382 |
| modifying | | |
| sgRNA | | |
| | TTCTCATTTGCAGGAAATGC | 383 |
| | UUCUCAUUUGCAGGAAAUGC | 384 |
| | CATTTAGTGCTGCTCTATGC | 385 |
| | CAUUUAGUGCUGCUCUAUGC | 386 |
| | CAGGAAATGCTGGCATAGAG | 387 |
| | CAGGAAAUGCUGGCAUAGAG | 388 |
| | TTGCAGGAAATGCTGGCATA | 389 |
| | UUGCAGGAAAUGCUGGCAUA | 390 |
| | ATTTGCAGGAAATGCTGGCA | 391 |
| | AUUUGCAGGAAAUGCUGGCA | 392 |
| | TGGCATAGAGCAGCACTAAA | 393 |
| | UGGCAUAGAGCAGCACUAAA | 394 |
| Exon 6 genomic | CTTTGGGAAGTATGTTAATTTCATGGTACATGAGTGGCTATCATACTGGCTATTATATGgtaagtaat | 395 |
| sequence (3270 | cactcagcatcttttcctgacaatttttttgtagttatgtgactttgttttgtaaattt | |
| is bolded) | | |
| sgRNA for ABE- | TACATGAGTGGCTATCATAC | 396 |
| mediated | | |
| codon- | | |
| switching in | | |
| exon 6 to | | |
| increase | | |
| stability of | | |
| SMN2 protein | | |
| | UACAUGAGUGGCUAUCAUAC | 397 |
| sgRNA | GTCTAAAACCCTGTAAGGAA | 408 |
| sgRNA | TGTCTAAAACCCTGTAAGGA | 409 |
| sgRNA | TTGTCTAAAACCCTGTAAGG | 410 |
| sgRNA | ATTTTGTCTAAAACCCTGTAAGG | 411 |
| sgRNA | GATTTTGTCTAAAACCCTGTAAG | 412 |
| sgRNA | TGATTTTGTCTAAAACCCTGTAA | 413 |
| sgRNA | GAAACCctgtaaggaaaataa | 414 |
| sgRNA | GTTTGTCTAAAACCctgtaag | 415 |
| sgRNA | GTTTTGTCTAAAACCctgtaa | 416 |
| sgRNA | GTGAGCACCTTCCTTCTTTT | 417 |
| sgRNA | GATGTGAGCACCTTCCTTCTT | 418 |
| sgRNA | GactccTTAATTTAAGGAATG | 419 |
| sgRNA | GcagacttactccTTAATTTA | 420 |
| sgRNA | GcagacttactccTTAATTTA | 421 |
| sgRNA | Gtaatgctggcagacttactc | 422 |
| sgRNA | Gttcactttcataatgctggc | 423 |
| sgRNA | Gaagattcactttcataatgc | 424 |
| sgRNA | Gacaaaagtaagattcacttt | 425 |
| sgRNA | Gacttcctttattttccttac | 426 |
| sgRNA | Gaacttcctttattttcctta | 427 |
| sgRNA | GtttccttacagGGTTTTAGA | 428 |
| sgRNA | GTTTAGACAAAATCAAAAAGA | 429 |
| sgRNA | GTTAGACAAAATCAAAAAGAA | 430 |
| sgRNA | GTAGACAAAATCAAAAAGAAG | 431 |
| sgRNA | GACAAAATCAAAAAGAAGGA | 432 |
| sgRNA | GAAGGAAGGTGCTCACATTCC | 433 |
| sgRNA | GTGCTCACATTCCTTAAATTA | 434 |
| sgRNA | GTGCTCACATTCCTTAAATT | 435 |
| sgRNA | GTGCTCACATTCCTTAAATTA | 436 |
| sgRNA | GCACATTCCTTAAATTAAgga | 437 |
| sgRNA | gagtaagtctgccagcatta | 438 |
| sgRNA | agtaagtctgccagcattat | 439 |
| sgRNA | gtctgccagcattatgaaag | 440 |
| sgRNA | Gagtctgccagcattatgaaa | 441 |
| sgRNA | Gcttacttttgtaaaacttta | 442 |
| sgRNA | Gttgtaaaactttatggtttg | 443 |
| sgRNA | aagcctctggttctaatttctcatttgcagGAAATGCTGGCATAGAGCAGCACTAAATGACACCACTA | 444 |
| | AAGAAACGATCAG | |
| sgRNA | GTTTCctgcaaatgagaaatt | 445 |
| sgRNA | GCCAGCATTTCctgcaaatg | 446 |
| sgRNA | GATGCCAGCATTTCctgcaaa | 447 |
| sgRNA | GCTCTATGCCAGCATTTCct | 448 |
| sgRNA | GAATGCTGGCATAGAGCAGCA | 449 |
| sgRNA | GTGGCATAGAGCAGCACTAAA | 450 |

Base editors used to generate training data for the BE-Hive Algorithm of Example 1

| | | |
|---|---|---|
| | | SEQ ID |
| DESCRIPTION | SEQUENCE | NO: |

The following CBEs were used to generate training data for the BE-Hive algorithm of Example 1.
Each of the CBEs have the same architecture of [NLS]-[deaminase]-[Cas 9]-[UGI]-[UGI]-[NLS]
(which is the BE4max architecture) and with interchangeable deaminases.
In addition, Cas-protein components of these editors can include SpCas9, SpCas9 circular
permutant 1028, or Cas9-NG. Amino acid sequences are provided for the BE4 (BE4max) construct as
an example, and separately amino acid sequences for deaminases and Cas9 proteins are provided
below.
Key:

| NLS (N-terminal) | Single underline | |
|---|---|---|
| APOBEC1 (BE4) | Double underline | |
| Linker | Italic | |
| SpCas9 | Plain | |
| Linker + 2xUGI | Bold underline | |
| NLS (C-terminal) | Single underline + italic | |
| BE4max (or BE4) | MKRTADGSEFESPKKKRKVSSETGPVAVDPTLRRRIEPHEFEVFFDPRELRKETCLLYE | 3200 |
| Cas9 = SpCas9 | INWGGRHSIWRHTSQNTNKHVEVNFIEKFTTERYFCPNTRCSITWFLSWSPCGECSRAI | |
| | TEFLSRYPHVTLFIYIARLYHHADPRNRQGLRDLISSGVTIQIMTEQESGYCWRNFVNY | |
| | SPSNEAHWPRYPHLWVRLYVLELYCIILGLPPCLNILRRKQPQLTFFTIALQSCHYQRL | |
| | PPHILWATGLKSGGSSGGSSGSETPGTSESATPESSGGSSGGDKKYSIGLAIGTNSVGW | |
| | AVITDEYKVPSKKFKVLGNTDRHSIKKNLIGALLFDSGETAEATRLKRTARRRYTRRKN | |
| | RICYLQEIFSNEMAKVDDSFFHRLEESFLVEEDKKHERHPIFGNIVDEVAYHEKYPTIY | |
| | HLRKKLVDSTDKADLRLIYLALAHMIKFRGHFLIEGDLNPDNSDVDKLFIQLVQTYNQL | |
| | FEENPINASGVDAKAILSARLSKSRRLENLIAQLPGEKKNGLFGNLIALSLGLTPNFKS | |
| | NFDLAEDAKLQLSKDTYDDDLDNLLAQIGDQYADLFLAAKNLSDAILLSDILRVNTEIT | |
| | KAPLSASMIKRYDEHHQDLTLLKALVRQQLPEKYKEIFFDQSKNGYAGYIDGGASQEEF | |
| | YKFIKPILEKMDGTEELLVKLNREDLLRKQRTFDNGSIPHQIHLGELHAILRRQEDFYP | |
| | FLKDNREKIEKILTFRIPYYVGPLARGNSRFAWMTRKSEETITPWNFEEVVDKGASAQS | |
| | FIERMTNFDKNLPNEKVLPKHSLLYEYFTVYNELTKVKYVTEGMRKPAFLSGEQKKAIV | |
| | DLLFKTNRKVTVKQLKEDYFKKIECFDSVEISGVEDRFNASLGTYHDLLKIIKDKDFLD | |
| | NEENEDILEDIVLTLTLFEDREMIEERLKTYAHLFDDKVMKQLKRRRYTGWGRLSRKLI | |
| | NGIRDKQSGKTILDFLKSDGFANRNFMQLIHDDSLTFKEDIQKAQVSGQGDSLHEHIAN | |
| | LAGSPAIKKGILQTVKVVDELVKVMGRHKPENIVIEMARENQTTQKGQKNSRERMKRIE | |
| | EGIKELGSQILKEHPVENTQLQNEKLYLYYLQNGRDMYVDQELDINRLSDYDVDHIVPQ | |
| | SFLKDDSIDNKVLTRSDKNRGKSDNVPSEEVVKKMKNYWRQLLNAKLITQRKFDNLTKA | |
| | ERGGLSELDKAGFIKRQLVETRQITKHVAQILDSRMNTKYDENDKLIREVKVITLKSKL | |
| | VSDFRKDFQFYKVREINNYHHAHDAYLNAVVGTALIKKYPKLESEFVYGDYKVYDVRKM | |
| | IAKSEQEIGKATAKYFFYSNIMNFFKTEITLANGEIRKRPLIETNGETGEIVWDKGRDF | |
| | ATVRKVLSMPQVNIVKKTEVQTGGFSKESILPKRNSDKLIARKKDWDPKKYGGFDSPTV | |
| | AYSVLVVAKVEKGKSKKLKSVKELLGITIMERSSFEKNPIDFLEAKGYKEVKKDLIIKL | |
| | PKYSLFELENGRKRMLASAGELQKGNELALPSKYVNFLYLASHYEKLKGSPEDNEQKQL | |
| | FVEQHKHYLDEIIEQISEFSKRVILADANLDKVLSAYNKHRDKPIREQAENIIHLFTLT | |
| | NLGAPAAFKYFDTTIDRKRYTSTKEVLDATLIHQSITGLYETRIDLSQLGGD [symbol] | |
| | [symbol] [symbol] [symbol] | |
| | [symbol] [symbol] [symbol] | |
| | [symbol] [symbol] [symbol] [symbol] | |
| | KRTADGSEFEPKKKRKV | |
| EA-BE4 | MKRTADGSEFESPKKKRKVSSETGPVAVDPTLRRRIEPHEFEVFFDPRELRKETCLLYE | 3201 |
| Cas9 = SpCas9 | INWGGREAIWRHTSQNTNKHVEVNFIEKFTTERYFCPNTRCSITWFLSWSPCGECSRAI | |
| | TEFLSRYPHVTLFIYIARLYHHADPRNRQGLRDLISSGVTIQIMTEQESGYCWRNFVNY | |
| | SPSNEAHWPRYPHLWVRLYVLELYCIILGLPPCLNILRRKQPQLTFFTIALQSCHYQRL | |
| | PPHILWATGLKSGGSSGGSSGSETPGTSESATPESSGGSSGGDKKYSIGLAIGTNSVGW | |
| | AVITDEYKVPSKKFKVLGNTDRHSIKKNLIGALLFDSGETAEATRLKRTARRRYTRRKN | |
| | RICYLQEIFSNEMAKVDDSFFHRLEESFLVEEDKKHERHPIFGNIVDEVAYHEKYPTIY | |
| | HLRKKLVDSTDKADLRLIYLALAHMIKFRGHFLIEGDLNPDNSDVDKLFIQLVQTYNQL | |
| | FEENPINASGVDAKAILSARLSKSRRLENLIAQLPGEKKNGLFGNLIALSLGLTPNFKS | |
| | NFDLAEDAKLQLSKDTYDDDLDNLLAQIGDQYADLFLAAKNLSDAILLSDILRVNTEIT | |
| | KAPLSASMIKRYDEHHQDLTLLKALVRQQLPEKYKEIFFDQSKNGYAGYIDGGASQEEF | |
| | YKFIKPILEKMDGTEELLVKLNREDLLRKQRTFDNGSIPHQIHLGELHAILRRQEDFYP | |
| | FLKDNREKIEKILTFRIPYYVGPLARGNSRFAWMTRKSEETITPWNFEEVVDKGASAQS | |
| | FIERMTNFDKNLPNEKVLPKHSLLYEYFTVYNELTKVKYVTEGMRKPAFLSGEQKKAIV | |
| | DLLFKTNRKVTVKQLKEDYFKKIECFDSVEISGVEDRFNASLGTYHDLLKIIKDKDFLD | |
| | NEENEDILEDIVLTLTLFEDREMIEERLKTYAHLFDDKVMKQLKRRRYTGWGRLSRKLI | |
| | NGIRDKQSGKTILDFLKSDGFANRNFMQLIHDDSLTFKEDIQKAQVSGQGDSLHEHIAN | |
| | LAGSPAIKKGILQTVKVVDELVKVMGRHKPENIVIEMARENQTTQKGQKNSRERMKRIE | |
| | EGIKELGSQILKEHPVENTQLQNEKLYLYYLQNGRDMYVDQELDINRLSDYDVDHIVPQ | |
| | SFLKDDSIDNKVLTRSDKNRGKSDNVPSEEVVKKMKNYWRQLLNAKLITQRKFDNLTKA | |
| | ERGGLSELDKAGFIKRQLVETRQITKHVAQILDSRMNTKYDENDKLIREVKVITLKSKL | |
| | VSDFRKDFQFYKVREINNYHHAHDAYLNAVVGTALIKKYPKLESEFVYGDYKVYDVRKM | |
| | IAKSEQEIGKATAKYFFYSNIMNFFKTEITLANGEIRKRPLIETNGETGEIVWDKGRDF | |
| | ATVRKVLSMPQVNIVKKTEVQTGGFSKESILPKRNSDKLIARKKDWDPKKYGGFDSPTV | |
| | AYSVLVVAKVEKGKSKKLKSVKELLGITIMERSSFEKNPIDFLEAKGYKEVKKDLIIKL | |
| | PKYSLFELENGRKRMLASAGELQKGNELALPSKYVNFLYLASHYEKLKGSPEDNEQKQL | |
| | FVEQHKHYLDEIIEQISEFSKRVILADANLDKVLSAYNKHRDKPIREQAENIIHLFTLT | |
| | NLGAPAAFKYFDTTIDRKRYTSTKEVLDATLIHQSITGLYETRIDLSQLGGD [symbol] | |
| | [symbol] [symbol] [symbol] [symbol] | |
| | [symbol] [symbol] [symbol] [symbol] | |
| | [symbol] [symbol] [symbol] [symbol] | |
| | [symbol] KRTADGSEFEPKKKRKV | |
| AID-BE4 | MKRTADGSEFESPKKKRKVDSLLMNRRKFLYQFKNVRWAKGRRETYLCYVVKRRDSATS | 3202 |
| Cas9 = SpCas9 | FSLDFGYLRNKNGCHVELLFLRYISDWDLDPGRCYRVTWFTSWSPCYDCARHVADFLRG | |
| | NPNLSLRIFTARLYFCEDRKAEPEGLRRLHRAGVQIAIMTFKDYFYCWNTFVENHERTF | |
| | KAWEGLHENSVRLSRQLRRILLPLYEVDDLRDAFRTLGLSGGSSGGSSGSETPGTSESA | |
| | TPESSGGSSGGDKKYSIGLAIGTNSVGWAVITDEYKVPSKKFKVLGNTDRHSIKKNLIG | |
| | ALLFDSGETAEATRLKRTARRRYTRRKNRICYLQEIFSNEMAKVDDSFFHRLEESFLVE | |
| | EDKKHERHPIFGNIVDEVAYHEKYPTIYHLRKKLVDSTDKADLRLIYLALAHMIKFRGH | |
| | FLIEGDLNPDNSDVDKLFIQLVQTYNQLFEENPINASGVDAKAILSARLSKSRRLENLI | |
| | AQLPGEKKNGLFGNLIALSLGLTPNFKSNFDLAEDAKLQLSKDTYDDDLDNLLAQIGDQ | |
| | YADLFLAAKNLSDAILLSDILRVNTEITKAPLSASMIKRYDEHHQDLTLLKALVRQQLP | |
| | EKYKEIFFDQSKNGYAGYIDGGASQEEFYKFIKPILEKMDGTEELLVKLNREDLLRKQR | |
| | TFDNGSIPHQIHLGELHAILRRQEDFYPFLKDNREKIEKILTFRIPYYVGPLARGNSRF | |
| | AWMTRKSEETITPWNFEEVVDKGASAQSFIERMTNFDKNLPNEKVLPKHSLLYEYFTVY | |
| | NELTKVKYVTEGMRKPAFLSGEQKKAIVDLLFKTNRKVTVKQLKEDYFKKIECFDSVEI | |
| | SGVEDRFNASLGTYHDLLKIIKDKDFLDNEENEDILEDIVLTLTLFEDREMIEERLKTY | |
| | AHLFDDKVMKQLKRRRYTGWGRLSRKLINGIRDKQSGKTILDFLKSDGFANRNFMQLIH | |
| | DDSLTFKEDIQKAQVSGQGDSLHEHIANLAGSPAIKKGILQTVKVVDELVKVMGRHKPE | |
| | NIVIEMARENQTTQKGQKNSRERMKRIEEGIKELGSQILKEHPVENTQLQNEKLYLYYL | |
| | QNGRDMYVDQELDINRLSDYDVDHIVPQSFLKDDSIDNKVLTRSDKNRGKSDNVPSEEV | |
| | VKKMKNYWRQLLNAKLITQRKFDNLTKAERGGLSELDKAGFIKRQLVETRQITKHVAQI | |
| | LDSRMNTKYDENDKLIREVKVITLKSKLVSDFRKDFQFYKVREINNYHHAHDAYLNAVV | |
| | GTALIKKYPKLESEFVYGDYKVYDVRKMIAKSEQEIGKATAKYFFYSNIMNFFKTEITL | |
| | ANGEIRKRPLIETNGETGEIVWDKGRDFATVRKVLSMPQVNIVKKTEVQTGGFSKESIL | |
| | PKRNSDKLIARKKDWDPKKYGGFDSPTVAYSVLVVAKVEKGKSKKLKSVKELLGITIME | |
| | RSSFEKNPIDFLEAKGYKEVKKDLIIKLPKYSLFELENGRKRMLASAGELQKGNELALP | |
| | SKYVNFLYLASHYEKLKGSPEDNEQKQLFVEQHKHYLDEIIEQISEFSKRVILADANLD | |
| | KVLSAYNKHRDKPIREQAENIIHLFTLTNLGAPAAFKYFDTTIDRKRYTSTKEVLDATL | |
| | IHQSITGLYETRIDLSQLGGD [symbol] [symbol] | |
| | [symbol] [symbol] [symbol] [symbol] | |
| | [symbol] [symbol] [symbol] | |
| | [symbol] [symbol] KRTADGSEFEPKKKRKV | |
| CDA-BE4 (or CDA1- | MKRTADGSEFESPKKKRKVTDAEYVRIHEKLDIYTFKKQFFNNKKSVSHRCYVLFELKR | 3203 |
| BE4max ) | RGERRACFWGYAVNKPQSGTERGIHAEIFSIRKVEEYLRDNPGQFTINWYSSWSPCADC | |
| Cas9 = SpCas9 | AEKILEWYNQELRGNGHTLKIWACKLYYEKNARNQIGLWNLRDNGVGLNVMVSEHYQCC | |
| | RKIFIQSSHNQLNENRWLEKTLKRAEKRRSELSIMIQVKILHTTKSPAVSGGSSGGSSG | |
| | SETPGTSESATPESSGGSSGGDKKYSIGLAIGTNSVGWAVITDEYKVPSKKFKVLGNTD | |
| | RHSIKKNLIGALLFDSGETAEATRLKRTARRRYTRRKNRICYLQEIFSNEMAKVDDSFF | |
| | HRLEESFLVEEDKKHERHPIFGNIVDEVAYHEKYPTIYHLRKKLVDSTDKADLRLIYLA | |
| | LAHMIKFRGHFLIEGDLNPDNSDVDKLFIQLVQTYNQLFEENPINASGVDAKAILSARL | |
| | SKSRRLENLIAQLPGEKKNGLFGNLIALSLGLTPNFKSNFDLAEDAKLQLSKDTYDDDL | |
| | DNLLAQIGDQYADLFLAAKNLSDAILLSDILRVNTEITKAPLSASMIKRYDEHHQDLTL | |
| | LKALVRQQLPEKYKEIFFDQSKNGYAGYIDGGASQEEFYKFIKPILEKMDGTEELLVKL | |
| | NREDLLRKQRTFDNGSIPHQIHLGELHAILRRQEDFYPFLKDNREKIEKILTFRIPYYV | |
| | GPLARGNSRFAWMTRKSEETITPWNFEEVVDKGASAQSFIERMTNFDKNLPNEKVLPKH | |
| | SLLYEYFTVYNELTKVKYVTEGMRKPAFLSGEQKKAIVDLLFKTNRKVTVKQLKEDYFK | |
| | KIECFDSVEISGVEDRFNASLGTYHDLLKIIKDKDFLDNEENEDILEDIVLTLTLFEDR | |
| | EMIEERLKTYAHLFDDKVMKQLKRRRYTGWGRLSRKLINGIRDKQSGKTILDFLKSDGF | |
| | ANRNFMQLIHDDSLTFKEDIQKAQVSGQGDSLHEHIANLAGSPAIKKGILQTVKVVDEL | |
| | VKVMGRHKPENIVIEMARENQTTQKGQKNSRERMKRIEEGIKELGSQILKEHPVENTQL | |
| | QNEKLYLYYLQNGRDMYVDQELDINRLSDYDVDHIVPQSFLKDDSIDNKVLTRSDKNRG | |
| | KSDNVPSEEVVKKMKNYWRQLLNAKLITQRKFDNLTKAERGGLSELDKAGFIKRQLVET | |
| | RQITKHVAQILDSRMNTKYDENDKLIREVKVITLKSKLVSDFRKDFQFYKVREINNYHH | |
| | AHDAYLNAVVGTALIKKYPKLESEFVYGDYKVYDVRKMIAKSEQEIGKATAKYFFYSNI | |
| | MNFFKTEITLANGEIRKRPLIETNGETGEIVWDKGRDFATVRKVLSMPQVNIVKKTEVQ | |
| | TGGFSKESILPKRNSDKLIARKKDWDPKKYGGFDSPTVAYSVLVVAKVEKGKSKKLKSV | |
| | KELLGITIMERSSFEKNPIDFLEAKGYKEVKKDLIIKLPKYSLFELENGRKRMLASAGE | |
| | LQKGNELALPSKYVNFLYLASHYEKLKGSPEDNEQKQLFVEQHKHYLDEIIEQISEFSK | |
| | RVILADANLDKVLSAYNKHRDKPIREQAENIIHLFTLTNLGAPAAFKYFDTTIDRKRYT | |
| | STKEVLDATLIHQSITGLYETRIDLSQLGGD [symbol] [symbol] | |
| | [symbol] [symbol] [symbol] [symbol] | |
| | [symbol] [symbol] [symbol] [symbol] | |
| | [symbol] [symbol] [symbol] | |
| | KRTADGSEFEPKKKRKV | |
| evoA-BE4 (or | MKRTADGSEFESPKKKRKVSKTGPVAVDPTLRRRIEPHEFEVFFDPRELRKETCLLYEI | 3204 |
| evoAPOBEC1-BE4max) | NWGGRHSIWRHTSQNTNKHVEVNFIEKFTTERYFCPNTRCSITWFLSWSPCGECSRAIT | |
| Cas9 = SpCas9 | EFLSRYPNVTLFIYIARLYHLANPRNRQGLRDLISSGVTIQIMTEQESGYCWHNFVNYS | |
| | PSNESHWPRYPHLWVRLYVLELYCIILGLPPCLNILRRKQSQLTSFTIALQSCHYQRLP | |
| | PHILWATGLKSGGSSGGSSGSETPGTSESATPESSGGSSGGDKKYSIGLAIGTNSVGWA | |
| | VITDEYKVPSKKFKVLGNTDRHSIKKNLIGALLFDSGETAEATRLKRTARRRYTRRKNR | |
| | ICYLQEIFSNEMAKVDDSFFHRLEESFLVEEDKKHERHPIFGNIVDEVAYHEKYPTIYH | |
| | LRKKLVDSTDKADLRLIYLALAHMIKFRGHFLIEGDLNPDNSDVDKLFIQLVQTYNQLF | |
| | EENPINASGVDAKAILSARLSKSRRLENLIAQLPGEKKNGLFGNLIALSLGLTPNFKSN | |
| | FDLAEDAKLQLSKDTYDDDLDNLLAQIGDQYADLFLAAKNLSDAILLSDILRVNTEITK | |
| | APLSASMIKRYDEHHQDLTLLKALVRQQLPEKYKEIFFDQSKNGYAGYIDGGASQEEFY | |
| | KFIKPILEKMDGTEELLVKLNREDLLRKQRTFDNGSIPHQIHLGELHAILRRQEDFYPF | |
| | LKDNREKIEKILTFRIPYYVGPLARGNSRFAWMTRKSEETITPWNFEEVVDKGASAQSF | |
| | IERMTNFDKNLPNEKVLPKHSLLYEYFTVYNELTKVKYVTEGMRKPAFLSGEQKKAIVD | |
| | LLFKTNRKVTVKQLKEDYFKKIECFDSVEISGVEDRFNASLGTYHDLLKIIKDKDFLDN | |
| | EENEDILEDIVLTLTLFEDREMIEERLKTYAHLFDDKVMKQLKRRRYTGWGRLSRKLIN | |
| | GIRDKQSGKTILDFLKSDGFANRNFMQLIHDDSLTFKEDIQKAQVSGQGDSLHEHIANL | |
| | AGSPAIKKGILQTVKVVDELVKVMGRHKPENIVIEMARENQTTQKGQKNSRERMKRIEE | |
| | GIKELGSQILKEHPVENTQLQNEKLYLYYLQNGRDMYVDQELDINRLSDYDVDHIVPQS | |
| | FLKDDSIDNKVLTRSDKNRGKSDNVPSEEVVKKMKNYWRQLLNAKLITQRKFDNLTKAE | |
| | RGGLSELDKAGFIKRQLVETRQITKHVAQILDSRMNTKYDENDKLIREVKVITLKSKLV | |
| | SDFRKDFQFYKVREINNYHHAHDAYLNAVVGTALIKKYPKLESEFVYGDYKVYDVRKMI | |
| | AKSEQEIGKATAKYFFYSNIMNFFKTEITLANGEIRKRPLIETNGETGEIVWDKGRDFA | |
| | TVRKVLSMPQVNIVKKTEVQTGGFSKESILPKRNSDKLIARKKDWDPKKYGGFDSPTVA | |
| | YSVLVVAKVEKGKSKKLKSVKELLGITIMERSSFEKNPIDFLEAKGYKEVKKDLIIKLP | |
| | KYSLFELENGRKRMLASAGELQKGNELALPSKYVNFLYLASHYEKLKGSPEDNEQKQLF | |
| | VEQHKHYLDEIIEQISEFSKRVILADANLDKVLSAYNKHRDKPIREQAENIIHLFTLTN | |
| | LGAPAAFKYFDTTIDRKRYTSTKEVLDATLIHQSITGLYETRIDLSQLGGD [symbol] | |
| | [symbol] [symbol] [symbol] [symbol] | |
| | [symbol] [symbol] [symbol] [symbol] [symbol] | |
| | [symbol] [symbol] [symbol] [symbol] [symbol] | |
| | [symbol] KRTADGSEFEPKKKRKV | |
| eA3A-BE4 | MKRTADGSEFESPKKKRKVEASPASGPRHLMDPHIFTSNFNNGIGRHKTYLCYEVERLD | 3205 |
| (or APOBEC3A) | NGTSVKMDQHRGFLHGQAKNLLCGFYGRHAELRFLDLVPSLQLDPAQIYRVTWFISWSP | |
| Cas9 = SpCas9 | CFSWGCAGEVRAFLQENTHVRLRIFAARIYDYDPLYKEALQMLRDAGAQVSIMTYDEFK | |
| | HCWDTFVDHQGCPFQPWDGLDEHSQALSGRLRAILQNQGNSGGSSGGSSGSETPGTSES | |
| | ATPESSGGSSGGDKKYSIGLAIGTNSVGWAVITDEYKVPSKKFKVLGNTDRHSIKKNLI | |
| | GALLFDSGETAEATRLKRTARRRYTRRKNRICYLQEIFSNEMAKVDDSFFHRLEESFLV | |
| | EEDKKHERHPIFGNIVDEVAYHEKYPTIYHLRKKLVDSTDKADLRLIYLALAHMIKFRG | |
| | HFLIEGDLNPDNSDVDKLFIQLVQTYNQLFEENPINASGVDAKAILSARLSKSRRLENL | |
| | IAQLPGEKKNGLFGNLIALSLGLTPNFKSNFDLAEDAKLQLSKDTYDDDLDNLLAQIGD | |
| | QYADLFLAAKNLSDAILLSDILRVNTEITKAPLSASMIKRYDEHHQDLTLLKALVRQQL | |
| | PEKYKEIFFDQSKNGYAGYIDGGASQEEFYKFIKPILEKMDGTEELLVKLNREDLLRKQ | |
| | RTFDNGSIPHQIHLGELHAILRRQEDFYPFLKDNREKIEKILTFRIPYYVGPLARGNSR | |
| | FAWMTRKSEETITPWNFEEVVDKGASAQSFIERMTNFDKNLPNEKVLPKHSLLYEYFTV | |
| | YNELTKVKYVTEGMRKPAFLSGEQKKAIVDLLFKTNRKVTVKQLKEDYFKKIECFDSVE | |
| | ISGVEDRFNASLGTYHDLLKIIKDKDFLDNEENEDILEDIVLTLTLFEDREMIEERLKT | |
| | YAHLFDDKVMKQLKRRRYTGWGRLSRKLINGIRDKQSGKTILDFLKSDGFANRNFMQLI | |
| | HDDSLTFKEDIQKAQVSGQGDSLHEHIANLAGSPAIKKGILQTVKVVDELVKVMGRHKP | |
| | ENIVIEMARENQTTQKGQKNSRERMKRIEEGIKELGSQILKEHPVENTQLQNEKLYLYY | |
| | LQNGRDMYVDQELDINRLSDYDVDHIVPQSFLKDDSIDNKVLTRSDKNRGKSDNVPSEE | |
| | VVKKMKNYWRQLLNAKLITQRKFDNLTKAERGGLSELDKAGFIKRQLVETRQITKHVAQ | |
| | ILDSRMNTKYDENDKLIREVKVITLKSKLVSDFRKDFQFYKVREINNYHHAHDAYLNAV | |
| | VGTALIKKYPKLESEFVYGDYKVYDVRKMIAKSEQEIGKATAKYFFYSNIMNFFKTEIT | |
| | LANGEIRKRPLIETNGETGEIVWDKGRDFATVRKVLSMPQVNIVKKTEVQTGGFSKESI | |
| | LPKRNSDKLIARKKDWDPKKYGGFDSPTVAYSVLVVAKVEKGKSKKLKSVKELLGITIM | |
| | ERSSFEKNPIDFLEAKGYKEVKKDLIIKLPKYSLFELENGRKRMLASAGELQKGNELAL | |
| | PSKYVNFLYLASHYEKLKGSPEDNEQKQLFVEQHKHYLDEIIEQISEFSKRVILADANL | |
| | DKVLSAYNKHRDKPIREQAENIIHLFTLTNLGAPAAFKYFDTTIDRKRYTSTKEVLDAT | |
| | LIHQSITGLYETRIDLSQLGGD [symbol] | |
| | [symbol] [symbol] | |
| | [symbol] [symbol] | |
| | [symbol] KRTADGSEFEPKKKRKV | |
| eA3A-T31A | MKRTADGSEFESPKKKRKVEASPASGPRHLMDPHIFTSNFNNGIGRHKAYLCYEVERLD | 3206 |
| Cas9 = SpCas9 | NGTSVKMDQHRGFLHGQAKNLLCGFYGRHAELRFLDLVPSLQLDPAQIYRVTWFISWSP | |
| | CFSWGCAGEVRAFLQENTHVRLRIFAARIYDYDPLYKEALQMLRDAGAQVSIMTYDEFK | |
| | HCWDTFVDHQGCPFQPWDGLDEHSQALSGRLRAILQNQGNSGGSSGGSSGSETPGTSES | |
| | ATPESSGGSSGGDKKYSIGLAIGTNSVGWAVITDEYKVPSKKFKVLGNTDRHSIKKNLI | |
| | GALLFDSGETAEATRLKRTARRRYTRRKNRICYLQEIFSNEMAKVDDSFFHRLEESFLV | |
| | EEDKKHERHPIFGNIVDEVAYHEKYPTIYHLRKKLVDSTDKADLRLIYLALAHMIKFRG | |
| | HFLIEGDLNPDNSDVDKLFIQLVQTYNQLFEENPINASGVDAKAILSARLSKSRRLENL | |
| | IAQLPGEKKNGLFGNLIALSLGLTPNFKSNFDLAEDAKLQLSKDTYDDDLDNLLAQIGD | |
| | QYADLFLAAKNLSDAILLSDILRVNTEITKAPLSASMIKRYDEHHQDLTLLKALVRQQL | |
| | PEKYKEIFFDQSKNGYAGYIDGGASQEEFYKFIKPILEKMDGTEELLVKLNREDLLRKQ | |
| | RTFDNGSIPHQIHLGELHAILRRQEDFYPFLKDNREKIEKILTFRIPYYVGPLARGNSR | |
| | FAWMTRKSEETITPWNFEEVVDKGASAQSFIERMTNFDKNLPNEKVLPKHSLLYEYFTV | |
| | YNELTKVKYVTEGMRKPAFLSGEQKKAIVDLLFKTNRKVTVKQLKEDYFKKIECFDSVE | |
| | ISGVEDRFNASLGTYHDLLKIIKDKDFLDNEENEDILEDIVLTLTLFEDREMIEERLKT | |
| | YAHLFDDKVMKQLKRRRYTGWGRLSRKLINGIRDKQSGKTILDFLKSDGFANRNFMQLI | |
| | HDDSLTFKEDIQKAQVSGQGDSLHEHIANLAGSPAIKKGILQTVKVVDELVKVMGRHKP | |
| | ENIVIEMARENQTTQKGQKNSRERMKRIEEGIKELGSQILKEHPVENTQLQNEKLYLYY | |
| | LQNGRDMYVDQELDINRLSDYDVDHIVPQSFLKDDSIDNKVLTRSDKNRGKSDNVPSEE | |
| | VVKKMKNYWRQLLNAKLITQRKFDNLTKAERGGLSELDKAGFIKRQLVETRQITKHVAQ | |
| | ILDSRMNTKYDENDKLIREVKVITLKSKLVSDFRKDFQFYKVREINNYHHAHDAYLNAV | |
| | VGTALIKKYPKLESEFVYGDYKVYDVRKMIAKSEQEIGKATAKYFFYSNIMNFFKTEIT | |
| | LANGEIRKRPLIETNGETGEIVWDKGRDFATVRKVLSMPQVNIVKKTEVQTGGFSKESI | |
| | LPKRNSDKLIARKKDWDPKKYGGFDSPTVAYSVLVVAKVEKGKSKKLKSVKELLGITIM | |
| | ERSSFEKNPIDFLEAKGYKEVKKDLIIKLPKYSLFELENGRKRMLASAGELQKGNELAL | |
| | PSKYVNFLYLASHYEKLKGSPEDNEQKQLFVEQHKHYLDEIIEQISEFSKRVILADANL | |
| | DKVLSAYNKHRDKPIREQAENIIHLFTLTNLGAPAAFKYFDTTIDRKRYTSTKEVLDAT | |
| | LIHQSITGLYETRIDLSQLGGD [symbol] [symbol] | |
| | [symbol] [symbol] [symbol] | |
| | [symbol] [symbol] [symbol] [symbol] | |
| | [symbol] [symbol] [symbol] KRTADGSEFEPKKKRKV | |
| eA3A-BE5 | MKRTADGSEFESPKKKRKVEASPASGPRHLMDPHIFTSNFNNGIGRHKTYLCYEVERLD | 3207 |
| Cas9 = SpCas9 | NGDAVKMDQHRGFLHGQAKNLLCGFYGRHAELRFLDLVPSLQLDPAQIYRVTWFISWSP | |
| | CFSWGCAGEVRAFLQENTHVRLRIFAARIYDYDPLYKEALQMLRDAGAQVSIMTYDEFK | |
| | HCWDTFVDHQGCPFQPWDGLDEHSQALSGRLRAILQNQGNSGGSSGGSSGSETPGTSES | |
| | ATPESSGGSSGGDKKYSIGLAIGTNSVGWAVITDEYKVPSKKFKVLGNTDRHSIKKNLI | |
| | GALLFDSGETAEATRLKRTARRRYTRRKNRICYLQEIFSNEMAKVDDSFFHRLEESFLV | |
| | EEDKKHERHPIFGNIVDEVAYHEKYPTIYHLRKKLVDSTDKADLRLIYLALAHMIKFRG | |
| | HFLIEGDLNPDNSDVDKLFIQLVQTYNQLFEENPINASGVDAKAILSARLSKSRRLENL | |
| | IAQLPGEKKNGLFGNLIALSLGLTPNFKSNFDLAEDAKLQLSKDTYDDDLDNLLAQIGD | |
| | QYADLFLAAKNLSDAILLSDILRVNTEITKAPLSASMIKRYDEHHQDLTLLKALVRQQL | |
| | PEKYKEIFFDQSKNGYAGYIDGGASQEEFYKFIKPILEKMDGTEELLVKLNREDLLRKQ | |
| | RTFDNGSIPHQIHLGELHAILRRQEDFYPFLKDNREKIEKILTFRIPYYVGPLARGNSR | |
| | FAWMTRKSEETITPWNFEEVVDKGASAQSFIERMTNFDKNLPNEKVLPKHSLLYEYFTV | |
| | YNELTKVKYVTEGMRKPAFLSGEQKKAIVDLLFKTNRKVTVKQLKEDYFKKIECFDSVE | |
| | ISGVEDRFNASLGTYHDLLKIIKDKDFLDNEENEDILEDIVLTLTLFEDREMIEERLKT | |
| | YAHLFDDKVMKQLKRRRYTGWGRLSRKLINGIRDKQSGKTILDFLKSDGFANRNFMQLI | |
| | HDDSLTFKEDIQKAQVSGQGDSLHEHIANLAGSPAIKKGILQTVKVVDELVKVMGRHKP | |
| | ENIVIEMARENQTTQKGQKNSRERMKRIEEGIKELGSQILKEHPVENTQLQNEKLYLYY | |
| | LQNGRDMYVDQELDINRLSDYDVDHIVPQSFLKDDSIDNKVLTRSDKNRGKSDNVPSEE | |
| | VVKKMKNYWRQLLNAKLITQRKFDNLTKAERGGLSELDKAGFIKRQLVETRQITKHVAQ | |
| | ILDSRMNTKYDENDKLIREVKVITLKSKLVSDFRKDFQFYKVREINNYHHAHDAYLNAV | |
| | VGTALIKKYPKLESEFVYGDYKVYDVRKMIAKSEQEIGKATAKYFFYSNIMNFFKTEIT | |
| | LANGEIRKRPLIETNGETGEIVWDKGRDFATVRKVLSMPQVNIVKKTEVQTGGFSKESI | |
| | LPKRNSDKLIARKKDWDPKKYGGFDSPTVAYSVLVVAKVEKGKSKKLKSVKELLGITIM | |
| | ERSSFEKNPIDFLEAKGYKEVKKDLIIKLPKYSLFELENGRKRMLASAGELQKGNELAL | |
| | PSKYVNFLYLASHYEKLKGSPEDNEQKQLFVEQHKHYLDEIIEQISEFSKRVILADANL | |
| | DKVLSAYNKHRDKPIREQAENIIHLFTLTNLGAPAAFKYFDTTIDRKRYTSTKEVLDAT | |
| | LIHQSITGLYETRIDLSQLGGD [symbol] [symbol] | |
| | [symbol] [symbol] [symbol] [symbol] | |
| | [symbol] [symbol] | |
| | [symbol] [symbol] | |
| | KRTADGSEFEPKKKRKV | |
| BE4-CP1028 | MKRTADGSEFESPKKKRKVSSETGPVAVDPTLRRRIEPHEFEVFFDPRELRKETCLLYE | 3208 |
| Cas9 = Cas9 CP1028 | INWGGRHSIWRHTSQNTNKHVEVNFIEKFTTERYFCPNTRCSITWFLSWSPCGECSRAI | |
| | TEFLSRYPHVTLFIYIARLYHHADPRNRQGLRDLISSGVTIQIMTEQESGYCWRNFVNY | |
| | SPSNEAHWPRYPHLWVRLYVLELYCIILGLPPCLNILRRKQPQLTFFTIALQSCHYQRL | |
| | PPHILWATGLKSGGSSGGSSGSETPGTSESATPESSGGSSGGEIGKATAKYFFYSNIMN | |
| | FFKTEITLANGEIRKRPLIETNGETGEIVWDKGRDFATVRKVLSMPQVNIVKKTEVQTG | |
| | GFSKESILPKRNSDKLIARKKDWDPKKYGGFDSPTVAYSVLVVAKVEKGKSKKLKSVKE | |
| | LLGITIMERSSFEKNPIDFLEAKGYKEVKKDLIIKLPKYSLFELENGRKRMLASAGELQ | |
| | KGNELALPSKYVNFLYLASHYEKLKGSPEDNEQKQLFVEQHKHYLDEIIEQISEFSKRV | |
| | ILADANLDKVLSAYNKHRDKPIREQAENIIHLFTLTNLGAPAAFKYFDTTIDRKRYTST | |
| | KEVLDATLIHQSITGLYETRIDLSQLGGDGGSGGSGGSGGSGGSGGSGGMDKKYSIGLA | |
| | IGTNSVGWAVITDEYKVPSKKFKVLGNTDRHSIKKNLIGALLFDSGETAEATRLKRTAR | |
| | RRYTRRKNRICYLQEIFSNEMAKVDDSFFHRLEESFLVEEDKKHERHPIFGNIVDEVAY | |
| | HEKYPTIYHLRKKLVDSTDKADLRLIYLALAHMIKFRGHFLIEGDLNPDNSDVDKLFIQ | |
| | LVQTYNQLFEENPINASGVDAKAILSARLSKSRRLENLIAQLPGEKKNGLFGNLIALSL | |
| | GLTPNFKSNFDLAEDAKLQLSKDTYDDDLDNLLAQIGDQYADLFLAAKNLSDAILLSDI | |
| | LRVNTEITKAPLSASMIKRYDEHHQDLTLLKALVRQQLPEKYKEIFFDQSKNGYAGYID | |
| | GGASQEEFYKFIKPILEKMDGTEELLVKLNREDLLRKQRTFDNGSIPHQIHLGELHAIL | |
| | RRQEDFYPFLKDNREKIEKILTFRIPYYVGPLARGNSRFAWMTRKSEETITPWNFEEVV | |
| | DKGASAQSFIERMTNFDKNLPNEKVLPKHSLLYEYFTVYNELTKVKYVTEGMRKPAFLS | |
| | GEQKKAIVDLLFKTNRKVTVKQLKEDYFKKIECFDSVEISGVEDRFNASLGTYHDLLKI | |
| | IKDKDFLDNEENEDILEDIVLTLTLFEDREMIEERLKTYAHLFDDKVMKQLKRRRYTGW | |
| | GRLSRKLINGIRDKQSGKTILDFLKSDGFANRNFMQLIHDDSLTFKEDIQKAQVSGQGD | |
| | SLHEHIANLAGSPAIKKGILQTVKVVDELVKVMGRHKPENIVIEMARENQTTQKGQKNS | |
| | RERMKRIEEGIKELGSQILKEHPVENTQLQNEKLYLYYLQNGRDMYVDQELDINRLSDY | |
| | DVDHIVPQSFLKDDSIDNKVLTRSDKNRGKSDNVPSEEVVKKMKNYWRQLLNAKLITQR | |
| | KFDNLTKAERGGLSELDKAGFIKRQLVETRQITKHVAQILDSRMNTKYDENDKLIREVK | |
| | VITLKSKLVSDFRKDFQFYKVREINNYHHAHDAYLNAVVGTALIKKYPKLESEFVYGDY | |
| | KVYDVRKMIAKSEQ [symbol] [symbol] [symbol] | |
| | [symbol] [symbol] [symbol] [symbol] | |
| | [symbol] [symbol] [symbol] [symbol] | |
| | [symbol] [symbol] [symbol] KRTADGSEFEPKKKRKV | |
| BE4-Cas9-NG | MKRTADGSEFESPKKKRKVSSETGPVAVDPTLRRRIEPHEFEVFFDPRELRKETCLLYE | 3209 |
| Cas9 = Cas9 NG | INWGGRHSIWRHTSQNTNKHVEVNFIEKFTTERYFCPNTRCSITWFLSWSPCGECSRAI | |
| | TEFLSRYPHVTLFIYIARLYHHADPRNRQGLRDLISSGVTIQIMTEQESGYCWRNFVNY | |
| | SPSNEAHWPRYPHLWVRLYVLELYCIILGLPPCLNILRRKQPQLTFFTIALQSCHYQRL | |
| | PPHILWATGLKSGGSSGGSSGSETPGTSESATPESSGGSSGGDKKYSIGLAIGTNSVGW | |
| | AVITDEYKVPSKKFKVLGNTDRHSIKKNLIGALLFDSGETAEATRLKRTARRRYTRRKN | |
| | RICYLQEIFSNEMAKVDDSFFHRLEESFLVEEDKKHERHPIFGNIVDEVAYHEKYPTIY | |
| | HLRKKLVDSTDKADLRLIYLALAHMIKFRGHFLIEGDLNPDNSDVDKLFIQLVQTYNQL | |
| | FEENPINASGVDAKAILSARLSKSRRLENLIAQLPGEKKNGLFGNLIALSLGLTPNFKS | |
| | NFDLAEDAKLQLSKDTYDDDLDNLLAQIGDQYADLFLAAKNLSDAILLSDILRVNTEIT | |
| | KAPLSASMIKRYDEHHQDLTLLKALVRQQLPEKYKEIFFDQSKNGYAGYIDGGASQEEF | |
| | YKFIKPILEKMDGTEELLVKLNREDLLRKQRTFDNGSIPHQIHLGELHAILRRQEDFYP | |
| | FLKDNREKIEKILTFRIPYYVGPLARGNSRFAWMTRKSEETITPWNFEEVVDKGASAQS | |
| | FIERMTNFDKNLPNEKVLPKHSLLYEYFTVYNELTKVKYVTEGMRKPAFLSGEQKKAIV | |
| | DLLFKTNRKVTVKQLKEDYFKKIECFDSVEISGVEDRFNASLGTYHDLLKIIKDKDFLD | |
| | NEENEDILEDIVLTLTLFEDREMIEERLKTYAHLFDDKVMKQLKRRRYTGWGRLSRKLI | |
| | NGIRDKQSGKTILDFLKSDGFANRNFMQLIHDDSLTFKEDIQKAQVSGQGDSLHEHIAN | |
| | LAGSPAIKKGILQTVKVVDELVKVMGRHKPENIVIEMARENQTTQKGQKNSRERMKRIE | |
| | EGIKELGSQILKEHPVENTQLQNEKLYLYYLQNGRDMYVDQELDINRLSDYDVDHIVPQ | |
| | SFLKDDSIDNKVLTRSDKNRGKSDNVPSEEVVKKMKNYWRQLLNAKLITQRKFDNLTKA | |
| | ERGGLSELDKAGFIKRQLVETRQITKHVAQILDSRMNTKYDENDKLIREVKVITLKSKL | |
| | VSDFRKDFQFYKVREINNYHHAHDAYLNAVVGTALIKKYPKLESEFVYGDYKVYDVRKM | |
| | IAKSEQEIGKATAKYFFYSNIMNFFKTEITLANGEIRKRPLIETNGETGEIVWDKGRDF | |
| | ATVRKVLSMPQVNIVKKTEVQTGGFSKESIRPKRNSDKLIARKKDWDPKKYGGFVSPTV | |
| | AYSVLVVAKVEKGKSKKLKSVKELLGITIMERSSFEKNPIDFLEAKGYKEVKKDLIIKL | |
| | PKYSLFELENGRKRMLASARFLQKGNELALPSKYVNFLYLASHYEKLKGSPEDNEQKQL | |
| | FVEQHKHYLDEIIEQISEFSKRVILADANLDKVLSAYNKHRDKPIREQAENIIHLFTLT | |
| | NLGAPRAFKYFDTTIDRKVYRSTKEVLDATLIHQSITGLYETRIDLSQLGGD [symbol] | |
| | [symbol] [symbol] [symbol] [symbol] | |
| | [symbol] [symbol] [symbol] [symbol] | |
| | [symbol] [symbol] [symbol] [symbol] | |
| | [symbol] KRTADGSEFEPKKKRKV | |

The following ABEs were used to generate training data for the BE-Hive algorithm of Example 1.
Each of the ABEs have the same architecture of [NLS]-[deaminase]-[Cas9]-[NLS] (which is the
ABEmax architecture) and use the same adenine deaminase, ABE7.10, with either the SpCas9 or
CP1041 circular permutant variant as the Cas9 component.

| In further detail, the architecture of ABEmax is: | | |
|---|---|---|
| [bpNLS]-[wt TadA]-[evolved TadA*]-[Cas9 D10A]-[bpNLS] | | |
| Key: | | |
| NLS (N-terminal) | Single underline | |
| ABE7.10 | Double underline | |
| Linker | Italic | |
| SpCas9 | Plain | |
| Linker + 2xUGI | Bold underline | |
| NLS (C-terminal) | Single underline + italic | |
| ABEmax (or ABE) | MKRTADGSEFESPKKKRKVSEVEFSHEYWMRHALTLAKRAWDEREVPVGAVLVHNNRVI | 3210 |
| | GEGWNRPIGRHDPTAHAEIMALRQGGLVMQNYRLIDATLYVTLEPCVMCAGAMIHSRIG | |
| | RVVFGARDAKTGAAGSLMDVLHHPGMNHRVEITEGILADECAALLSDFFRMRRQEIKAQ | |
| | KKAQSSTDSGGSSGGSSGSETPGTSESATPESSGGSSGGSSEVEFSHEYWMRHALTLAK | |
| | RARDEREVPVGAVLVLNNRVIGEGWNRAIGLHDPTAHAEIMALRQGGLVMQNYRLIDAT | |
| | LYVTFEPCVMCAGAMIHSRIGRVVFGVRNAKTGAAGSLMDVLHYPGMNHRVEITEGILA | |
| | DECAALLCYFFRMPRQVFNAQKKAQSSTDSGGSSGGSSGSETPGTSESATPESSGGSSG | |
| | GSDKKYSIGLAIGTNSVGWAVITDEYKVPSKKFKVLGNTDRHSIKKNLIGALLFDSGET | |
| | AEATRLKRTARRRYTRRKNRICYLQEIFSNEMAKVDDSFFHRLEESFLVEEDKKHERHP | |
| | IFGNIVDEVAYHEKYPTIYHLRKKLVDSTDKADLRLIYLALAHMIKFRGHFLIEGDLNP | |
| | DNSDVDKLFIQLVQTYNQLFEENPINASGVDAKAILSARLSKSRRLENLIAQLPGEKKN | |
| | GLFGNLIALSLGLTPNFKSNFDLAEDAKLQLSKDTYDDDLDNLLAQIGDQYADLFLAAK | |
| | NLSDAILLSDILRVNTEITKAPLSASMIKRYDEHHQDLTLLKALVRQQLPEKYKEIFFD | |
| | QSKNGYAGYIDGGASQEEFYKFIKPILEKMDGTEELLVKLNREDLLRKQRTFDNGSIPH | |
| | QIHLGELHAILRRQEDFYPFLKDNREKIEKILTFRIPYYVGPLARGNSRFAWMTRKSEE | |
| | TITPWNFEEVVDKGASAQSFIERMTNFDKNLPNEKVLPKHSLLYEYFTVYNELTKVKYV | |
| | TEGMRKPAFLSGEQKKAIVDLLFKTNRKVTVKQLKEDYFKKIECFDSVEISGVEDRFNA | |
| | SLGTYHDLLKIIKDKDFLDNEENEDILEDIVLTLTLFEDREMIEERLKTYAHLFDDKVM | |
| | KQLKRRRYTGWGRLSRKLINGIRDKQSGKTILDFLKSDGFANRNFMQLIHDDSLTFKED | |
| | IQKAQVSGQGDSLHEHIANLAGSPAIKKGILQTVKVVDELVKVMGRHKPENIVIEMARE | |
| | NQTTQKGQKNSRERMKRIEEGIKELGSQILKEHPVENTQLQNEKLYLYYLQNGRDMYVD | |
| | QELDINRLSDYDVDHIVPQSFLKDDSIDNKVLTRSDKNRGKSDNVPSEEVVKKMKNYWR | |
| | QLLNAKLITQRKFDNLTKAERGGLSELDKAGFIKRQLVETRQITKHVAQILDSRMNTKY | |
| | DENDKLIREVKVITLKSKLVSDFRKDFQFYKVREINNYHHAHDAYLNAVVGTALIKKYP | |
| | KLESEFVYGDYKVYDVRKMIAKSEQEIGKATAKYFFYSNIMNFFKTEITLANGEIRKRP | |
| | LIETNGETGEIVWDKGRDFATVRKVLSMPQVNIVKKTEVQTGGFSKESILPKRNSDKLI | |
| | ARKKDWDPKKYGGFDSPTVAYSVLVVAKVEKGKSKKLKSVKELLGITIMERSSFEKNPI | |
| | DFLEAKGYKEVKKDLIIKLPKYSLFELENGRKRMLASAGELQKGNELALPSKYVNFLYL | |
| | ASHYEKLKGSPEDNEQKQLFVEQHKHYLDEIIEQISEFSKRVILADANLDKVLSAYNKH | |
| | RDKPIREQAENIIHLFTLTNLGAPAAFKYFDTTIDRKRYTSTKEVLDATLIHQSITGLY | |
| | ETRIDLSQLGGD [symbol] [symbol] [symbol] [symbol] | |
| | [symbol] [symbol] [symbol] [symbol] | |
| | [symbol] [symbol] [symbol] | |
| | [symbol] [symbol] KRTADGSEFEPKKKRKV | |
| ABE-CP1041 (or ABE-CP) | MKRTADGSEFESPKKKRKVSEVEFSHEYWMRHALTLAKRAWDEREVPVGAVLVHNNRVI | 3211 |
| | GEGWNRPIGRHDPTAHAEIMALRQGGLVMQNYRLIDATLYVTLEPCVMCAGAMIHSRIG | |
| | RWFGARDAKTGAAGSLMDVLHHPGMNHRVEITEGILADECAALLSDFFRMRRQEIKAQ | |
| | KKAQSSTDSGGSSGGSSGSETPGTSESATPESSGGSSGGSSEVEFSHEYWMRHALTLAK | |
| | RARDEREVPVGAVLVLNNRVIGEGWNRAIGLHDPTAHAEIMALRQGGLVMQNYRLIDAT | |
| | LYVTFEPCVMCAGAMIHSRIGRVVFGVRNAKTGAAGSLMDVLHYPGMNHRVEITEGILA | |
| | DECAALLCYFFRMPRQVFNAQKKAQSSTDSGGSSGGSSGSETPGTSESATPESSGGSSG | |
| | GSNIMNFFKTEITLANGEIRKRPLIETNGETGEIVWDKGRDFATVRKVLSMPQVNIVKK | |
| | TEVQTGGFSKESILPKRNSDKLIARKKDWDPKKYGGFDSPTVAYSVLVVAKVEKGKSKK | |
| | LKSVKELLGITIMERSSFEKNPIDFLEAKGYKEVKKDLIIKLPKYSLFELENGRKRMLA | |
| | SAGELQKGNELALPSKYVNFLYLASHYEKLKGSPEDNEQKQLFVEQHKHYLDEIIEQIS | |
| | EFSKRVILADANLDKVLSAYNKHRDKPIREQAENIIHLFTLTNLGAPAAFKYFDTTIDR | |
| | KRYTSTKEVLDATLIHQSITGLYETRIDLSQLGGDGGSGGSGGSGGSGGSGGSGGDKKY | |
| | SIGLAIGTNSVGWAVITDEYKVPSKKFKVLGNTDRHSIKKNLIGALLFDSGETAEATRL | |
| | KRTARRRYTRRKNRICYLQEIFSNEMAKVDDSFFHRLEESFLVEEDKKHERHPIFGNIV | |
| | DEVAYHEKYPTIYHLRKKLVDSTDKADLRLIYLALAHMIKFRGHFLIEGDLNPDNSDVD | |
| | KLFIQLVQTYNQLFEENPINASGVDAKAILSARLSKSRRLENLIAQLPGEKKNGLFGNL | |
| | IALSLGLTPNFKSNFDLAEDAKLQLSKDTYDDDLDNLLAQIGDQYADLFLAAKNLSDAI | |
| | LLSDILRVNTEITKAPLSASMIKRYDEHHQDLTLLKALVRQQLPEKYKEIFFDQSKNGY | |
| | AGYIDGGASQEEFYKFIKPILEKMDGTEELLVKLNREDLLRKQRTFDNGSIPHQIHLGE | |
| | LHAILRRQEDFYPFLKDNREKIEKILTFRIPYYVGPLARGNSRFAWMTRKSEETITPWN | |
| | FEEVVDKGASAQSFIERMTNFDKNLPNEKVLPKHSLLYEYFTVYNELTKVKYVTEGMRK | |
| | PAFLSGEQKKAIVDLLFKTNRKVTVKQLKEDYFKKIECFDSVEISGVEDRFNASLGTYH | |
| | DLLKIIKDKDFLDNEENEDILEDIVLTLTLFEDREMIEERLKTYAHLFDDKVMKQLKRR | |
| | RYTGWGRLSRKLINGIRDKQSGKTILDFLKSDGFANRNFMQLIHDDSLTFKEDIQKAQV | |
| | SGQGDSLHEHIANLAGSPAIKKGILQTVKVVDELVKVMGRHKPENIVIEMARENQTTQK | |
| | GQKNSRERMKRIEEGIKELGSQILKEHPVENTQLQNEKLYLYYLQNGRDMYVDQELDIN | |
| | RLSDYDVDHIVPQSFLKDDSIDNKVLTRSDKNRGKSDNVPSEEVVKKMKNYWRQLLNAK | |
| | LITQRKFDNLTKAERGGLSELDKAGFIKRQLVETRQITKHVAQILDSRMNTKYDENDKL | |
| | IREVKVITLKSKLVSDFRKDFQFYKVREINNYHHAHDAYLNAVVGTALIKKYPKLESEF | |
| | VYGDYKVYDVRKMIAKSEQEIGKATAKYFFY [symbol] [symbol] | |
| | [symbol] [symbol] [symbol] [symbol] | |
| | [symbol] [symbol] [symbol] [symbol] | |
| | [symbol] [symbol] [symbol] [symbol] | |
| | KRTADGSEFEPKKKRKV | |

[0790] The above base editors used in generating training data for Example 1 can be further found described in (a) Koblan, L. W., Doman, J. L., Wilson, C., Levy, J. M., Tay, T., Newby, G. A., Maianti, J. P., Raguram, A., and Liu, D. R. (2018). Improving cytidine and adenine base editors by expression optimization and ancestral reconstruction. Nat. Biotechnol. 36, 843-848; (b) Gehrke, J. M., Cervantes, O., Clement, M. K., Wu, Y., Zeng, J., Bauer, D. E., Pinello, L., and Joung, J. K. (2018). An APOBeC3A-Cas9 base editor with minimized bystander and off-target activities. Nat. Biotechnol. 36, 977; (c) Huang, T. P., Zhao, K. T., Miller, S. M., Gaudelli, N. M., Oakes, B. L., Fellmann, C., Savage, D. F., and Liu, D. R. (2019). Circularly permuted and PAM-modified Cas9 variants broaden the targeting scope of base editors. Nat. Biotechnol; (d) Komor, A. C., Zhao, K. T., Packer, M. S., Gaudelli, N. M., Waterbury, A. L., Koblan, L. W., Kim, Y. B., Badran, A. H., and Liu, D. R. (2017). Improved base excision repair inhibition and bacteriophage Mu Gam protein yields C:G-to-T:A base editors with higher efficiency and product purity. Sci. Adv. 3, eaao4774; (e) Thuronyi, B. W., Koblan, L. W., Levy, J. M., Yeh, W.-H., Zheng, C., Newby, G. A., Wilson, C., Bhaumik, M., Shubina-Oleinik, O., Holt, J. R., et al. (2019). Continuous evolution of base editors with expanded target compatibility and improved activity. Nat. Biotechnol.; and (f) Gaudelli, N. M., Komor, A. C., Rees, H. A., Packer, M. S., Badran, A. H., Bryson, D. I., and Liu, D. R. (2017). Programmable base editing of A⋅T to G⋅C in genomic DNA without DNA cleavage. Nature 551, 464-471, each of which are incorporated herein by reference.

### EXAMPLES

### Example 1. Target Sequence and Deaminase Determinants of Base Editing Outcomes Revealed by Substrate Library Analysis and Machine Learning (BE-Hive Algorithm)

### Summary

[0791] Base editors are widely used tools that enable targeted point mutations in DNA, but the factors that determine base editing outcomes have not been comprehensively studied, impeding the optimal choice and use of base editors from among many reported variants. The sequence activity relationships of 11 cytosine and adenine base editors (CBEs and ABEs) on 38,538 genomically-integrated targets in mammalian cells were characterized, and the resulting outcomes were used to develop BE-Hive (crisprbehive.design), a machine learning model that predicts base editing genotypes (R≈0.9) and efficiency (R≈0.7). The genotypes of 3,388 disease-associated SNVs were corrected with ≥90% precision consistent with prediction (R=0.78-0.92), including 675 alleles with bystander nucleotides that BE-Hive correctly predicted would not be efficiently edited. Sequence determinants of previously unpredictable CBE-mediated transversions were discovered and corrected 174 SNVs with >90% precision among edited amino acid sequences by C⋅G-to-G⋅C and C⋅G-to-A⋅T editing. Base editing outcomes were also discovered that were not predicted by inspection, but could be accurately captured and predicted by BE-Hive. Finally, a new role was established for CBE-deaminases in resolving U⋅G intermediates was established, and base editor variants that modulated this process were engineered. These discoveries deepen the understanding of base editors, enable their use at previously intractable targets, and provide new base editors with improved editing capabilities.

### Introduction

[0792] Programmable editing of single nucleotides in genomic DNA is a key capability for both research and therapeutic applications (Adli, 2018; Anzalone et al., 2019; Doench et al., 2016; Doudna and Knott, 2018; Pérez-Palma et al., 2019; Rees and Liu, 2018; Shen et al., 2018). Single-nucleotide variants (SNVs) represent approximately half of known pathogenic alleles (Landrum et al., 2016; Stenson et al., 2014), and thus targeted installation of point mutations can facilitate the study or potential treatment of genetic disorders. Previously, cytosine deaminases were developed, and laboratory-evolved adenine deaminase enzymes fused to catalytically impaired CRISPR-Cas proteins to enable cytosine and adenine base editing in living cells in a programmable fashion without requiring a DNA double-strand break or a donor DNA template (Gaudelli et al., 2017; Gehrke et al., 2018; Huang et al., 2019; Komor et al., 2016; Nishida et al., 2016; Thuronyi et al., 2019; Yeh et al., 2018). Cytosine base editors (CBEs) and adenine base editors (ABEs) together enable all four transition point mutations (C→T, T→C, A→G, and G→A) and routinely achieve high ratios of desired sequence substitutions relative to undesired insertions and deletions (indels) (Lin et al., 2014; Paquet et al., 2016). Base editing has been applied in a wide range of organisms ranging from bacteria to plants to primates (Rees and Liu, 2018), and has already been used to correct pathogenic mutations in animal models, in some cases with phenotypic rescue (Chadwick et al., 2017; Liang et al., 2017; Min et al., 2019; Ryu et al., 2018; Song et al., 2019; Villiger et al., 2018; Yeh et al., 2018; Zeng et al., 2018), establishing its potential for clinical applications.

[0793] The utility of base editing has inspired the development of many cytosine and adenine base editor variants with distinct editing properties (Adli, 2018; Molla and Yang, 2019; Rees and Liu, 2018). To date, these properties have been gleaned by analyzing base editing outcomes at a modest number of genomic sites, often chosen to align with previous genome editing studies (Gaudelli et al., 2017; Gehrke et al., 2018; Huang et al., 2019; Komor et al., 2016; Thuronyi et al., 2019). The interplay between base editor and target sequence, however, influences base editing outcomes in complex and occasionally unintuitive ways (Gehrke et al., 2018; Huang et al., 2019; Tan et al., 2019; Thuronyi et al., 2019; Villiger et al., 2018). As a result, obtaining a desired genotype with useful efficiencies often requires empirical optimization of base editor and single guide RNA (sgRNA) choice for each target. Likewise, some viable targets that do not fit canonical guidelines for base editing use may be overlooked since simple guidelines for target selection likely do not fully capture the scope of base editing.

[0794] A systematic and comprehensive analysis of sequence and deaminase determinants of base editing thus would enhance the understanding of base editors, facilitate their use in precision editing applications, and guide development of new base editors with enhanced abilities to induce or prevent rare base editing outcomes. As described herein, libraries of 38,538 total pairs of sgRNAs and target sequences were developed and integrated into three mammalian cell types to comprehensively characterize base editing outcomes and sequence-activity relationships for eight popular cytosine and adenine base editors in living cells. The roles of deaminases, sequence context, and cell type in determining genotypes that result from base editing were analyzed, and a machine learning model was developed that accurately predicts base editing outcomes, including many previously unpredictable features, at any target site of interest. Using the resulting information, a variety of base editors were applied, including newly engineered variants, to precisely correct 3,388 genotypes and 2,399 coding sequences of disease-associated SNVs to wild-type with ≥90% precision among edited products, including by previously poorly understood non-canonical base editing outcomes. These findings substantially extend the understanding of base editing and reveal new capabilities of both new and previously described base editors.

### Results

### Development of a Genome-Integrated Target Site Library Assay for Base Editors

[0795] To refine the understanding of sequence features that govern base editing outcomes, a comprehensive and unbiased approach to characterizing base editors was sought. Libraries of 4,000 or 12,000 oligonucleotides up to 176 nt long encoding unique 20-nt sgRNA spacers were designed and paired with target sequences (35, 56, or 61 bp in length) that contain an NGG or NG protospacer adjacent motif (PAM) to direct Streptococcus pyogenes Cas9 (SpCas9) (Cong et al., 2013; Jinek et al., 2013; Mali et al., 2013) or Cas9-NG, an engineered variant with broadened PAM compatibility (Nishimasu et al., 2018), to the center of each target site (FIG. 1A). Targets included randomly selected wild-type human genomic sequences that flanked partially synthetic base editor target sequences with highly variable sequence compositions, or disease-associated (pathogenic and likely-pathogenic) human genomic sequences selected from the NCBI ClinVar database (July, 2018) and the Human Gene Mutation Database (HGMD, v.2017_4 SNVs) (Landrum et al., 2016; Stenson et al., 2014). Protospacers were cloned upstream of SpCas9 F+E-modified hairpins with improved stability and folding properties (Chen et al., 2013), and a G was added to the 5′ end of spacers that did not natively start with G to ensure efficient transcription from the U6 promoter (Ma et al., 2014). Libraries were cloned into a plasmid that supports Tol2-transposon mediated genomic integration, sgRNA expression, and hygromycin selection for cells with integrated library members (Arbab et al., 2015; Barkal et al., 2016; Shen et al., 2018; Sherwood et al., 2014; Urasaki et al., 2006).

[0796] The genomes of mouse embryonic stem cells (mESCs), human HEK293T cells, and human U2OS cells were stably integrated with ≥38,538 unique library cassettes, and transfected with a base editor expression plasmid that supports Tol2-transposon mediated genomic integration and blasticidin selection. To detect rare and diverse editing outcomes with high sensitivity, an average coverage of ≥300× per library cassette was maintained throughout the process. After five days, genomic DNA was collected from treated cells and untreated cells as a control, amplified the library cassettes, and performed high-throughput sequencing (HTS) of the target sites at an average sequencing depth of ≥4,000× per target. This high sequencing depth maximized the number of unique library members that were suitable for downstream analysis despite variability among the representation of library members.

[0797] Using this approach, six commonly used CBEs in the NLS- and codon-optimized BE4max architecture were studied (bpNLS-deaminase-Cas9 D10A-2× uracil glycosylase inhibitor (UGI)-bpNLS) (Koblan et al., 2018): BE4max (referred to hereafter as BE4), circularly permuted CP1028-CBEmax (BE4-CP), evoAPOBEC1-BE4max (evoA-BE4), AID (AID-BE4), CDA1-BE4max (CDA-BE4), and engineered APOBEC3A (eA3A-BE4) (Gehrke et al., 2018; Huang et al., 2019; Komor et al., 2017; Thuronyi et al., 2019). Additionally, two ABEs: ABEmax (bpNLS-wt TadA-evolved TadA*-Cas9 D10A-bpNLS, referred to hereafter as ABE) and circularly permuted CP1041-ABEmax (ABE-CP) (Gaudelli et al., 2017; Huang et al., 2019) were studied, for a total of eight base editors spanning a diverse range of editing window sizes and sequence preferences. Two biological replicates per base editor and per cell type were performed, and average editing efficiencies (frequency of target-modified outcomes among total sequenced reads) ranging from 2.9% to 58% (FIGS. 8A-8B) were observed. The resulting data from 2.1 billion sequencing reads was processed, including quality filtering, identification and removal of PCR recombination products, sequence alignment, tabulating editing outcomes, adjusting treated conditions with matched untreated data, and adjusting for batch effects (STAR Methods) to obtain a read count distribution with an average of 1,317 reads per library member per experiment.

[0798] Data from library members with low read count were filtered to accurately calculate editing efficiency (fraction of sequenced reads with edited outcomes) and outcome purities (frequency of a given outcome among all edited reads). Between biological replicates, the frequency of base editing outcomes among edited reads at library targets was consistent (median Pearson's R=0.87 across 33 conditions, FIG. 8C) across editors, libraries, and cell types. Editing outcomes at library control sequences taken from the human genome were also consistent with editing outcomes at endogenous loci across five base editors with both narrow and broad editing windows (interquartile range (IQR) of R=0.79-0.98, FIG. 8D). Together, these observations suggest the data are comprehensive, consistent with endogenous editing, and at a scale not previously assayed in base editing.

### Systematic Characterization of Base Editing Activity

[0799] Analysis of base editing characteristics at a modest number of endogenous sites (Gaudelli et al., 2017; Gehrke et al., 2018; Huang et al., 2019; Komor et al., 2016; Thuronyi et al., 2019) is constrained by limited variability among the factors that could affect base editing outcomes, including target sequence composition, target sequence context, and locus-dependent differences in DNA-binding proteins and transcriptional state.

[0800] To assess sequence-activity relationships of ABEs and CBEs in a more comprehensive manner, base editing outcomes in a genome-integrated library assay with highly diverse sequence compositions were investigated. The library included 8,142 base editor target sequences with all possible 6-mers surrounding a substrate A or C nucleotide at protospacer position 6, and 2,496 sgRNA-target pairs that collectively contain all possible 5-mers included across positions −1 to 13 (counting the position immediately upstream of the protospacer as position 0). This library was designed to enable the detection of deamination events at virtually any sequence context within the reported editing windows of the eight base editors tested, which collectively span protospacer positions 1 to 11 (Gaudelli et al., 2017; Huang et al., 2019; Komor et al., 2016; Thuronyi et al., 2019). The flanking sequences were randomly drawn from the human genome. This collection of 10,638 library members is referred to as the “comprehensive context library”.

[0801] Reads containing indels and base editing outcomes were quantified among the remaining reads from the observed frequencies of all possible nucleotide substitutions from protospacer positions −10 to 35 at individual sequences. Mutations statistically likely to be from DNA sequencing errors were filtered. Robust-rank aggregation was applied to identify editor-specific mutation events that consistently occurred above background frequencies across replicates. These analyses handled all mutation events in an identical manner to minimize bias in the resulting editing profiles (FIG. 1B, FIGS. 8E-8H, FIGS. 9A-9L; STAR Methods).

[0802] These profiles revealed variation in editing window positions, distributions of base editing activity, and positional preferences among the eight different base editors tested. BE4 and evoA-BE4 edit at 50% or greater of their maximum frequency at positions 4-8 and 3-8 respectively, consistent with previous reports (Komor et al., 2017; Thuronyi et al., 2019). A unique bimodal editing profile for eA3A-BE4, with an additional peak in activity at protospacer position 13 to up to 18% relative to the maximum editing frequency, was observed that had not previously been reported (Gehrke et al., 2018). The remaining editing windows detected in the assay are in general agreement with, but refine, previous reports (Supplemental Information to Example 1).

[0803] As described herein, the editing window is defined using a lowered threshold of >30% maximum editing frequency to include more positions that can undergo substantial base editing. Editors with windows of nine or more nucleotides were classified as wide-window editors, including ABE-CP, BE4-CP, AID-BE4, and CDA-BE4, and eight or fewer nucleotides as narrow-window editors, including ABE, BE4, evoA-BE4, and eA3A-BE4.

### Sequence-Activity Relationships for Common Base Editing Outcomes

[0804] While deaminase-specific sequence preferences have been reported to affect nucleotide conversion efficiencies of some base editors (Beale et al., 2004; Komor et al., 2016; Liu et al., 2018), sequence-activity relationships of base editors have not been characterized in depth. Sequence motifs were generated for various base editing activities, such as editing efficiency, by using logistic regression to predict activity from target sequence context, and depict the learned weights as a sequence logo (FIGS. 2A-2F; Supplementary Information). Motifs described in this manner consider each position independently and are intended for data visualization.

[0805] Sequence motifs were first calculated for the efficiency of canonical base editing activity in which CBEs convert C⋅G to T⋅A and ABEs convert A⋅T to G⋅C. Motifs for each editor were obtained at ≥7,091 unique substrate nucleotides in their editing windows at ≥5,292 target sequences (FIG. 2C), that were consistent across cell types and biological replicates (FIG. 10C). These findings identify sequence context as an important determinant of editing activity across all editors with the exception of CDA-BE4, for which only 5.3% of the variance in editing efficiency is explained by target motifs in held-out sequences (variance explained=R²) compared to 15-32% on average across all other base editors.

[0806] Interestingly, it was observed that evoA-BE4, which emerged from laboratory evolution to gain activity at GC motifs, acquired a relative aversion to AC targets. This newly acquired anti-preference was previously undetected from analyses at a smaller number of endogenous loci (Thuronyi et al., 2019), likely due to the general increase in base editing activity of evoA-BE4 at all target sequence contexts, including AC, relative to BE4. Similarly, it was found that ABE maintains a preference against AA despite its laboratory evolution that increased activity at sites with adjacent As (Gaudelli et al., 2017). These findings demonstrate that systematic characterization of base editing outcomes at a large number of diverse sequences can reveal CBE and ABE sequence preferences with greater sensitivity than before.

### Non-Canonical Nucleotide Conversions by Base Editors

[0807] The analysis revealed several non-canonical editing outcomes. G⋅C-to-A⋅T editing activity by the wide-window editors BE4-CP and AID-BE4 at PAM-distal positions 0 to −5 with mean frequencies of 1.0% and 1.8% among edited reads was observed, respectively (FIG. 1B and FIGS. 9A-9D), in contrast to the narrow-window editors evoA-BE4 and BE4 at 0.32% and 0.43% among edited reads, respectively. These rare outcomes had sequence motifs strongly resembling the reverse complement of each editor's primary cytosine editing activity (for example GA instead of TC, for BE4 and BE4-CP), suggesting that they occur via opposite-strand cytosine deamination (AUC=0.65-0.77, P<5.9×10⁻³, Mann-Whitney U; FIGS. 2D-2E). These G⋅C-to-A⋅T edits are likely inhibited by sgRNA:DNA interactions at protospacer positions 1-20, which may explain their lower overall observed frequency in narrow-window CBEs that do not readily access PAM-distal positions. CDA-BE4 was the notable exception among wide-window editors, which actively edited C⋅G-to-T⋅A at positions −1 to 9 but induced little to no observable G⋅C-to-A⋅T editing.

[0808] Cytosine transversion mutations (C to G, or C to A) have previously been observed as a rare CBE outcome (Komor et al., 2016, 2017; Nishida et al., 2016). A strong dependence of transversion edits on local sequence context that was consistent by editor was observed across cell types and biological replicates (FIG. 11A). A preferred motif of RCTA explained 17-37% of the variance among held-out sequences across all CBEs (FIG. 2F). Particularly high transversion frequencies were observed from the narrow-window editor eA3A-BE4 (FIGS. 1B-1I), which averaged 12% transversions relative to the maximum C⋅G-to-T⋅A editing frequency, and a skewed ratio of C-to-G over C-to-A transversion outcomes (˜3:1 for eA3A, compared to ˜3:2 for the remaining CBEs). Together, these results reveal that local sequence context and deaminase choice can influence the frequency and specific outcome of rare CBE transversion editing events.

[0809] Rare editing outcomes from ABEs were also identified (FIGS. 1B-1I). The unexpected conversion of C to G, or C to T at protospacer position 6 averaging 0.34% and 0.62% of edited reads for ABE-CP and ABE, respectively, was also observed. These rare outcomes were accurately predicted by the TCY sequence motif, achieving AUC=0.75-0.78 on held-out target sequences (P<6.7×10⁻²³, Mann-Whitney U; FIG. 2G), that strongly resembles the motif for canonical ABE adenine-to-guanine conversion activity (TAY), but is instead centered around. The similarity between these motifs suggests that these rare events occur from direct cytosine deamination by the TadA* active site. Notably, comparable relative frequencies of C⋅G-to-G⋅C and C⋅G-to-T⋅A conversion by ABE cytosine editing were observed, reminiscent of CBE product distribution in early-generation editors that lack UGI (Komor et al., 2016, 2017; Nishida et al., 2016). These observations are consistent with, and extend, a recent report of cytosine editing by ABEs (Kim et al., 2019).

[0810] Collectively, these results illuminate sequence- and deaminase determinants of non-canonical ABE and CBE editing outcomes, suggest potential mechanisms of opposite-strand CBE editing, and deepen the understanding of ABE editing of cytosines.

Characterization of Indels Resulting from Base Editors

[0811] To date, the factors that determine indel frequency and outcomes in base editing experiments have not been well characterized. Consistent with prior reports, generally high ratios of desired base edits to undesired indels were observed, averaging 40:1 for the six CBEs and 145:1 for the ABEs (geometric means), although BE:indel ratios varied substantially by target; for example, IQRs for CBEs were 15:1 to 100:1 (FIG. 2G; Supplementary Information). Wide-window editors generally induced indels at lower relative frequencies than narrow-window editors.

[0812] The outcome analyses revealed a characteristic positional profile of insertions and deletions specific to base editors (Supplementary Information). Deletions were centered around either the PAM-proximal HNH domain's nick location preceding protospacer position 18, or the PAM-distal deamination peak position for the CBE (often position 6), or spanned these two sites resulting in a peak in outcome frequency at ˜12 bp deletions (FIG. 2H and FIG. 12A), while insertions predominantly consist of single or multiple nucleotide duplications preceding position 18, at the location of the HNH-nick (FIG. 2I and FIG. 12B). The rare insertion outcomes from base editing are similar to, yet distinct from, insertion products of Cas9 nuclease-mediated editing, which are heavily dominated by 1-bp duplications of the nucleotide immediately 5′ of the double-strand break (Shen et al., 2018).

[0813] Indel frequencies are largely unaffected by cell type and sequence context. A 1.2-fold increase in BE:indel ratio in HEK293T cells, and 2.1-fold increase in U20S cells relative to mESCs, was observed although neither was statistically significant (FIG. 11D). Strong sequence determinants of indels resulting from base editing were not observed. Sequence motifs trained to predict BE:indel ratios only explain 0.5-8.4% of variation in held-out sequences (P<7.0×10⁻³¹; FIGS. 12C-12D).

[0814] Collectively, these analyses provide the first comprehensive characterization of indels that result from base editing. The relative rarity of indels resulting from base editing was confirmed, a minor dependence on cell type and target sequence was observed, and a unique location profile of indel outcomes was determined that was distinct from that of Cas9 nuclease-mediated indels.

### Editing Efficiency Model

[0815] Base editing efficiency at endogenous genomic loci depends on a number of factors. Local sequence context determines deaminase sequence-dependent activity, and PAM compatibility affects the accessibility of the target nucleotide to the deaminase. In addition, cell type specific factors, including replication rate, the abundance of repair proteins, and DNA states such as chromatin accessibility and transcriptional activity may affect sgRNA binding and repair of deaminated nucleotides. Since sequence composition is not cell type-dependent, revealing how sequence features affect base editing efficiency has the potential to benefit experimental design across all cell types. While previous reports have assessed how local sequence context at a given target site impacts deaminase efficiency (Gaudelli et al., 2017; Gehrke et al., 2018; Komor et al., 2016), empirical optimization of editor and sgRNA choice is still often necessary due to the lack of simple relationships between target sequence context and base editing outcomes (Huang et al., 2019; Tan et al., 2019; Thuronyi et al., 2019; Villiger et al., 2018).

[0816] A model to inform the design of base editing experiments including all possible choices of base editors, sgRNAs, and targets to enable a desired phenotype were sought (FIG. 3A; Supplementary Information). The relationship between sequence and base editing efficiency was investigated using the comprehensive context library across two biological replicates in each of three cell types. Sequence motif models were trained and it was found that the learned motifs (FIG. 12E) resemble a combination of each editor's single-nucleotide sequence motif and activity window. To consider higher-order interactions and additional features, gradient-boosted regression trees were applied (FIG. 3B) (Friedman, 2001). These models improved on the performance of logistic regression motifs (R=0.50-0.57) and achieved R=0.69-0.80 for ABEs and R=0.53-0.74 for CBEs in held-out sequences (FIG. 3C and FIGS. 12F-12G) in mES cells. In HEK293T cells, the models achieved R up to 0.60 for ABEs and eA3A-BE4. The tree models found features including sgRNA melting temperature, G/C fraction, and dinucleotide motifs (such as TC for some CBEs and AA for ABEs) were useful in predicting base editing efficiency).

[0817] These efficiency models, as with most machine learning models, provide output on an abstract scale by default, however, with a minimal amount of user input, the output can be calibrated to their custom experimental conditions to provide outputs on a more natural scale as the fraction of sequenced reads with any base editing activity. This model design, in contrast with other models developed for CRISPR-related editing efficiency, alleviates the requirement for users to perform additional heuristic interpretation of machine learning model outputs (Doench et al., 2016).

### Bystander Editing Model

[0818] “Bystander editing” of non-target C or A nucleotides located near the target nucleotide represents a significant challenge for precision base editing, as ˜70% (1-0.754) of targets have two or more C or A nucleotides within a five-nucleotide window. In many base editing applications, bystander edits that result in silent coding mutations may be innocuous, thus broadening the potential number of desirable editing outcomes. Thus far, design guidelines for avoiding bystander edits have relied on heuristics derived from data at modest numbers (typically 10-100) of sites, and often do not dissect what combinations of target and bystander editing events are most likely to occur, and which targets are amenable to precise single-nucleotide editing or coding correction.

[0819] To predict bystander base editing patterns, a deep conditional autoregressive machine learning model (Van Den Oord et al., 2016) was designed that uses an input target sequence surrounding a protospacer and PAM to output a frequency distribution on combinations of base editing outcomes (FIG. 3D; Supplementary Information). Data was randomly split from up to 10,638 sgRNA-target pairs in the comprehensive context library by an 8:1:1 ratio into training, validation, and test data sets to train and test the model. The model predicts all nucleotide substitutions from protospacer positions −10 to 20. To flexibly model editing profiles with any shape, a learned positional bias towards producing an unedited outcome was introduced. An architecture search, ablation analysis, and comparisons to baseline methods (STAR methods) were performed and it was concluded that the autoregressive design and use of a high-capacity decoder were important for predictive performance. Across the six CBEs and two ABEs tested here, the bystander model performed strongly at predicting the frequencies of bystander editing patterns, achieving a median R=0.86-0.99 on ≥606 held-out target sequences in mES cells (FIG. 3E and FIGS. 12H-12I). The model retained strong performance even at target sites with many substrate nucleotides (FIGS. 13A-13B).

[0820] Deaminase enzymes and base editors are reported as having varying degrees of processivity, the ability to sequentially catalyze multiple base conversions without releasing the target DNA (Gaudelli et al., 2017; Komor et al., 2016; Love et al., 2012; Nishida et al., 2016; Pham et al., 2003). Base editing processivity can be evaluated using disequilibrium scores, the ratio between observed frequency of two proximal nucleotides both being edited and the expected frequency assuming statistical independence. A large variation in disequilibrium scores of base editors (FIG. 3F and FIGS. 13C-13D; Supplementary Information) that was accurately predicted by the bystander model (R=0.71 and 0.74 for BE4 and eA3A-BE4) was observed, demonstrating that it has learned higher-order conditional editing probabilities.

[0821] The editing efficiency and bystander editing models were collectively named “BE-Hive”, freely accessible at crisprbehive.design. Using target sequence as input alone, BE-Hive estimates base editing efficiency and outcomes at the single-nucleotide and coding-level. BE-Hive represents the first tool for designing base editing experiments that comprehensively considers on-target editing efficiency, deaminase and sequence-related preferences for various editing outcomes, and the likelihood of bystander edits to distinguish targets that are amenable to high-precision single-nucleotide editing and coding-sequence correction using a variety of established base editors (FIG. 3G).

### Model-Guided Precise Correction of Pathogenic Alleles

[0822] A deeper understanding of base editor sequence-activity relationships would facilitate the selection of optimal base editor and sgRNA combinations that maximize editing efficiency and precise editing of only the intended target nucleotide(s) at a given locus. The ability of the bystander editing model to predict correction of disease-relevant alleles by base editing was examined. A library of 12,000 sgRNA-target pairs for 7,444 unique disease-associated variants from ClinVar and HGMD that are correctable by precise C⋅G-to-T⋅A conversion was designed, which was referred to as the “CBE precision editing SNV library”. Analogously, the “ABE precision editing SNV library” was designed, which assesses precise A⋅T-to-G⋅C editing of ABEs with 12,000 sgRNA-target pairs for 11,585 unique SNV variants. For both libraries of disease-associated SNVs, ˜80% were previously annotated as pathogenic while the remaining were classified as likely pathogenic (Landrum et al., 2016; Stenson et al., 2014). To comprehensively assess the model's performance, the library was intentionally designed to include SNVs in suboptimal protospacer positions and with both high and low correction precision and efficiency as predicted by a preliminary version of BE-Hive. HTS data was obtained for these 24,000 sgRNA-target pairs using the genome-integrated library assay in mouse and human cells for eight base editors. BE-Hive accurately predicted correction precision, which is the fraction of edited reads that contain an exact single-nucleotide edit that corrects the SNV to the wild-type allele, achieving median R=0.89 for ABEs and 0.86 for CBEs in mES and HEK293T cells (FIG. 4A and FIGS. 13E-13G). A ≥90% precise single-nucleotide correction to the wild-type allele at 3,036 SNVs by ABEs and 364 by CBEs was observed.

[0823] Precise single-nucleotide correction is less frequent when multiple substrate nucleotides are present in the window, ranging from 2.9% to 16% on average for CBEs and 26% to 34% for ABEs (FIG. 4B). However, 675 unique disease-associated SNVs that underwent ≥90% single-nucleotide correction precision were observed (524 by editing with ABEs and 151 with CBEs), despite containing bystander C or A nucleotides within the editing window (FIG. 4C). Importantly, these SNVs could not be previously identified as likely candidates for high-precision single-nucleotide correction due to the presence of potential bystander substrate nucleotides, but were nonetheless predicted by BE-Hive with high accuracy in mES and HEK293T cells (R=0.78 to 0.92). BE-Hive predicted correction precisions were well-calibrated with observed correction precisions for all eight base editors in mouse and human cells (FIG. 4A and FIGS. 13E-13G): for example, sgRNA-targets with predicted correction precisions above 90% had an average observed correction precision of 91.8% with BE4, and analogously, predictions between 45-55% had an average observed correction precision of 48.4%, and predictions between 25-35% had an average correction precision of 27.1%. Thus, BE-Hive enables accurate apriori identification of targets amenable to highly precise single-nucleotide base editing despite the presence of bystander nucleotides.

[0824] When only a single C or A nucleotide is present in the editing window, prediction of single-nucleotide base editing precision may seem trivial. However, substantial variation in editing outcomes by CBEs and ABEs was observed even among these substrates. With only a single cytosine at position 6 in its window, BE4 single-nucleotide correction precision ranged from 0% to 100% at 157 sites with an average of 65% (FIG. 4D), demonstrating that at some sequence contexts, editing outside of the activity window can be at least as efficient as editing within the window. BE-Hive accurately predicted outcomes at target sites with a single editable nucleotide in the window, with R ranging from 0.92 to 0.94 for CBEs and 0.79 to 0.93 for ABEs. Similarly, editing outcomes varied substantially when exactly two editable C or A nucleotides were present at fixed protospacer positions. At 31 disease-associated SNVs positioned at C5 with a bystander C3 and no other cytosines (IUPAC code D) in positions 2-10, single-nucleotide correction precisions by BE4 ranging from 5.6% to 93% (FIG. 4E) were observed. Similarly, at 136 SNVs positioned at A6 with a bystander only at A8, single-nucleotide correction precisions by ABE ranged from near 0% to 99% (FIG. 4F). These data demonstrate that base editing precision is not dependent on position and number of editable nucleotides alone. Importantly, for both classes of target sequences, BE-Hive accurately predicted correction precisions with R=0.94 for BE4 and 0.71 for ABE.

[0825] These results reveal that single-nucleotide base editing relies on a complex relationship between the position of target and bystander nucleotides and base editor sequence preferences that cannot simply be derived from activity window and dinucleotide preference alone (see Supplementary Information for Example 1), but that can be accurately captured by machine learning. For example, a few SNVs at protospacer positions 5 and 7 achieved the highest correction precision of all CBEs by editing with the wide-window editor BE4-CP (FIG. 4G), even with additional cytosines present in its window. BE-Hive performed very strongly across CBEs at predicting correction precision at targets with at least one bystander C in each editor's activity window (FIGS. 4G-4H; BE-Hive R=0.91 and 0.96).

[0826] Taken together, the above results establish BE-Hive as an experimentally validated method for optimizing base editor choices to produce desired editing outcomes in mammalian cells—including those that cannot be predicted by inspection—with high precision, and to identify sites amenable to precise editing that would not otherwise be candidates for precision base editing.

### Target Sequence Features Partially Determine Rare CBE Outcomes

[0827] The occurrence of rare base editing outcomes varies by base editor, cell type, and target site. While cytosine transversion byproducts and indels that result from CBEs are thought to arise from abasic lesions produced by UNG-mediated removal of uracil (Komor et al., 2016), native motifs of UNG-mediated cytosine transition and transversions (WACT and WGCT, respectively) are weak predictors of CBE-editing outcomes (FIGS. 2D-2E and FIG. 11A; Supplementary Information for Example 1) (Pérez-Durán et al., 2012). An assessment of the contribution of sequence context in determining specific CBE-mediated cytosine conversion to G and A, its potential utility in editing disease-relevant SNVs, and the ability of BE-Hive to accurately predict these events were sought.

[0828] Whether sequence contexts predicted by BE-Hive to support CBE-mediated transversion are frequent in disease-relevant contexts was investigated. The search was focused on targets editable by eA3A-BE4 editing, which displayed the highest frequency of cytosine transversion byproducts in the library assay (FIGS. 1B-1I). Among 18,523 ClinVar and HGMD human disease-associated cytosine transversion variants, BE-Hive identified 2,090 unique alleles predicted to be predisposed to C⋅G-to-G⋅C conversion, and 289 alleles predisposed to C⋅G-to-A⋅T conversion by eA3A-BE4 and eA3A-BE4-NG editing. While an RCTA motif (test R=0.63) is predictive of C⋅G-to-G⋅C conversion, a looser and weaker RC motif (test R=0.39) is predicted to predispose sites to C⋅G-to-A⋅T outcomes (FIG. 5A). These findings suggest that sequence features not only affect the ratio of CBE-mediated cytosine transition versus transversion outcomes but may also determine the specific transversion product.

[0829] The significance of these sequence features was experimentally expressed using a library of 3,400 sgRNA-target pairs predicted to induce 8.5%-78% precise single-nucleotide C⋅G-to-G⋅C conversion and 400 sgRNA-target pairs to induce 5.9%-30% C⋅G-to-A⋅T conversion among edited outcomes by eA3A-BE4 and eA3A-BE4-NG editing, which was collectively named the “transversion-enriched SNV library”. Higher cytosine transversion purity in mES cells in this library was observed, averaging 25% by eA3A-BE4-NG, compared to 12% by eA3A-BE4 in the comprehensive context library (P=2.7×10⁻⁹³, Welch's T-test, N=2,440 versus 5,282 substrate nucleotides; FIG. 5B) and compared to approximately 3% on average across all other CBEs tested. These results indicate that BE-Hive learned sequence features that determine cytosine transversion outcomes of cytosine base editing.

[0830] Among cytosine transversion outcomes, C⋅G rarely converts to an A⋅T (Imai et al., 2003). To investigate whether some contexts could support C⋅G-to-A⋅T conversion as the main product, BE-Hive was used to design 20 synthetic sequences optimized for this goal and observed a 4-fold elevated mean C⋅G-to-A⋅T editing purity of 16% among edited products, with a maximum of 53% (FIG. 14B), compared to the baseline average purity of 4.0% of edited outcomes across the comprehensive context library by eA3A-BE4 (P=0.0195, Welch's T-test, N=13,627 vs. 12 substrate cytosines in 12 target sequences). These data suggest that BE-Hive has learned sequence features that influence both types of cytosine transversion outcome at a given site.

[0831] Whether CBE-mediated cytosine transversions co-segregate with indels was explored, and no meaningful relationship was observed between cytosine transversion purity and BE:indel ratio by eA3A-BE4-NG editing (R=−0.02, P=0.2, N=4,320 target sites; FIG. 5C). These data suggest that the disease-associated sequence contexts predicted by BE-Hive to yield heightened transversion product purities enrich for specific resolution of abasic intermediates towards transversion edits, rather than merely increasing abasic site formation by promoting base excision that would increase the frequency of both outcomes.

### CBE-Mediated Correction of Transversion SNVs

[0832] Many SNVs in protein coding regions are known to cause human disease (Landrum et al., 2016; Stenson et al., 2014). For missense or nonsense variants, correction to the wild-type or a synonymous coding sequence can be sufficient to restore protein function. A correction of 121 disease-associated transversion SNVs was achieved in the transversion-enriched SNV library with ≥90% precision among edited amino acid sequences (≥90% amino acid precision) for C⋅G-to-G⋅C at 118 SNVs and for C⋅G-to-A⋅T at 3 SNVs (FIGS. 5D-5E). Importantly, BE-Hive accurately predicted amino acid precisions by eA3A-BE4-NG at these sites (R=0.78; FIG. 5F), enabling the correction of an entirely new class of point mutants not previously considered candidates for correction by CBEs. These included four distinct hemophilia A related alleles of factor VIII (F8), also known as anti-hemophilic factor (AHF), a disease that is considered a viable candidate for gene therapy approaches as only 1% restoration of plasma levels offers therapeutic benefit to patients (Doshi and Arruda, 2018). All four cytosine transversion alleles were corrected with 95% amino acid precision on average as predicted by BE-Hive (92% average; and above average editing efficiency (15% compared to 12% average editing across the transversion-enriched SNV library).

[0833] BE-Hive predicted the precise single-nucleotide correction of cytosine transversion SNVs with moderate accuracy of R=0.47 (FIG. 5F), indicating that the learned RCTA motif is an important but incomplete determinant of cytosine transversion purity. 33 unique disease-associated SNVs in which exact single-nucleotide correction by conversion of C⋅G to either G⋅C or A⋅T was the dominant editing outcome in ≥50% of edited reads was observed. The highest C⋅G-to-G⋅C correction precision achieved was 93% at a pathogenic mutation in the dystrophin gene (DMD), while the highest C⋅G-to-A⋅T correction precision was 28% for a pathogenic mutation in MutL homolog 1 (MLH1).

[0834] The above findings experimentally confirm BE-Hive predictive accuracy in identifying sequence determinants of CBE-mediated transversion outcomes, enabling the identification and correction of a previously unrecognized class of disease-relevant SNVs by cytosine transversion base editing.

### Mutations to Conserved APOBEC Residues Increase Rare Cytosine Transversions

[0835] To dissect the role of CBEs in promoting rare editing outcomes, the means by which fused cytosine deaminases affect U⋅G mismatch repair was investigated (Supplemental Information to Example 1). Notably, CDA-BE4 yields transversion and indel base editing products at frequencies lower than that of other CBEs or what may be expected from its editing window size alone (FIGS. 1B-1I and 2E) (Komor et al., 2017). The DNA-mutating sea lamprey (Petromyzon marinus) derived CDA1 enzyme is evolutionarily more distant, and shares fewer conserved residues with, the mammalian APOBEC proteins assayed as CBEs (FIGS. 6A-6B).

[0836] The resolution of U⋅G to canonical or rare outcomes is mediated by endogenous DNA repair. The difference in CDA-BE4 outcomes relative to the trend among other CBEs may suggest that APOBEC family deaminases mediate interactions with DNA repair factors differently from CDA1. With the exception of AID, interactions between cytosine deaminases investigated here as components of CBEs and mammalian DNA-repair proteins have not extensively been studied (Adolph et al., 2017; Chaudhuri and Behan, 2004). In somatic hypermutation and immunoglobulin class-switching, phosphorylated residues S38 and T27 in AID are thought to play a role in determining repair outcomes of U⋅G mismatches (Basu et al., 2005; McBride et al., 2008; Pham et al., 2008; Yamane et al., 2011). These phosphorylation sites are not conserved in CDA1 but are widely conserved among mammalian APOBEC family members (FIG. 6B) (Blom et al., 2004), leading us to speculate that these protein domains may play a role in influencing editing outcomes of some CBEs.

[0837] Whether the mutation of conserved residues in APOBEC family members could affect partitioning of U⋅G mismatch repair outcomes was investigated. T31 in eA3A-BE4-NG, homologous to T27 in AID, was mutated to alanine (A), and an increase in transversion outcomes was observed in the transversion-enriched SNV library to 31%, compared to 25% by eA3A-BE4-NG (P=1.9×10⁵, Welch's T-test, N=2,440 versus 1,741 substrate nucleotides; FIG. 6C, and compared to approximately 3% on average across all other CBEs on the comprehensive context library. The T31A mutation did not meaningfully alter cytosine transversion motifs (FIG. 11A and FIG. 14C) or BE:indel ratios (46:1 compared to 45:1) relative to eA3A-BE4, though a reduction in editing efficiency was observed (FIG. 6D), consistent with reports on the T27A mutation in AID (Basu et al., 2005). In contrast, alanine mutation of T44, equivalent to S38 in AID, did not significantly affect editing outcomes (FIG. 6C). These results suggest that mutation of some conserved phosphorylated residues in CBE-fused APOBEC family members can affect the distribution of cytosine base editing outcomes.

[0838] Notably, the increase in transversion purity by eA3A-BE4-NG(T31A) was site dependent. While the mean transversion frequency in the comprehensive context library in mES cells was unchanged relative to eA3A-BE4, a 2.9-fold increase was observed in the fraction of alleles corrected with ≥90% amino acid precision by C⋅G-to-G⋅C or C⋅G-to-A⋅T editing of the transversion-enriched SNV library to 20% of assayed targets (FIG. 5E and FIG. 6E). These included two pathogenic G⋅C-to-C⋅G alleles of the low-density lipoprotein receptor gene (LDLR) that cause familial hypercholesterolemia; each was corrected back to wild-type with 100% and 99% precision among edited amino acid sequences. These data demonstrate that eA3A-BE4-NG(T31A) can increase cytosine transversion purity at disease-associated SNVs that support transversion outcomes. Collectively, these findings suggest that deaminases strongly affect the partitioning of U⋅G mismatch repair outcomes that arise from abasic lesions, establishing a new role for CBE deaminases beyond deamination activity alone.

[0839] Importantly, BE-Hive predictions of cytosine transversion outcomes were accurate, with R=0.84 for amino acid precision and R=0.55 for predicting genotype precision (FIG. 6F). Among SNVs identified by BE-Hive, 66 unique G⋅C-to-C⋅G coding mutations were corrected in 25 of the 59 genes identified as medically actionable by the American College of Medical Genetics (ACMG 59 genes) (Kalia et al., 2016) by editing with eA3A-BE4 variants, achieving ≥78% average amino acid precision (BE-Hive predicted average 74%). These findings demonstrate the utility of BE-Hive in designing base editing experiments for precision editing of clinically relevant targets that were not previously appreciated as likely candidates for CBE-mediated correction, by both canonical and non-canonical editing.

### Mutations to Conserved APOBEC Residues Improve Cytosine Transition Purity

[0840] Given the observation that mutation of conserved residues in eA3A-BE4 can affect CBE outcomes, whether deaminase variants can decrease unintended transversion edits, and thereby increase desired C⋅G-to-T⋅A product purities, was investigated. Residue S38 in AID is a known PKA target (Basu et al., 2005), and computational analysis revealed this phosphorylation site is conserved (Blom et al., 2004). Phosphomimetic amino acid substitution to either aspartate (D) or glutamate (E) of APOBEC1 residue H47, equivalent to AID S38, was examined in BE4 (FIG. 6B). Cytosine transversion outcomes on the comprehensive context library in HEK293T cells was measured, and indeed a reduction in transversion byproducts from 5.1% average by BE4 editing, to 4.7% by H47D (P=0.41) and 4.2% by H47E variants (P=1.3×10⁻⁴, Welch's T-test; FIG. 7A) was observed.

[0841] Mutation of the adjacent conserved residue S48 to alanine further reduced transversion byproducts resulting from these variants, down to 3.7% for BE4(H47E+S48A) (FIG. 7A). This variant (EA-BE4) reduced transversion product purity by 27% on average compared to BE4 (95% CI: 18-35% reduction, P=1.5×10⁻⁸, Welch's T-test, N=3,636 and 1,208 substrate nucleotides), while maintaining a similar editing window, editing sequence preference, and disequilibrium score (FIGS. 7B-7C), but with a small loss in editing efficiency (averaging 16%, compared to 18% in BE4 in the same batch; FIG. 7D) and a slight shift in BE:indel ratio (32:1 with IQR=12:1 to 85:1, compared to 36:1 with IQR=12:1 to 100:1 for BE4; FIG. 14D).

[0842] Next, the same changes were introduced to equivalent residues in eA3A-BE4 to investigate whether the effect of these mutations is generalizable among APOBEC family members. In HEK293T cells, D and E substitution of T44, equivalent to S38 in AID, reduced undesired transversion edits from 9.8%, to 8.8% (P=0.06) and 7.9% (P=4.2×10⁻⁷), respectively (FIG. 7E). Alanine substitution of the adjacent conserved S45 residue alone did not have a significant effect, but the combination of T44D+S45A further lowered transversion purity to mean 7.1%, reduced by 27% compared to canonical eA3A-BE4 editing (95% CI: 17-36% reduction; P=1.0×10⁻⁶, Welch's T-test, N=1,837 and 685 substrate nucleotides). Identical editing efficiency was observed in the same experimental batch by the T44D+S45A variant and eA3A-BE4 and a mildly elevated geometric mean BE:indel ratio (46:1 compared to 43:1, respectively) with no effect on editing window, sequence preference, or disequilibrium score (FIGS. 7F-7H and FIG. 14E). Furthermore, a minor improvement in single-nucleotide editing bystander precision of 15% (38% in eA3A-BE4(T44D+S45A) was noted, relative to 33% in eA3A-BE4, FIG. 7I), achieving the highest single-nucleotide editing precision of all CBEs tested here. No apparent downsides were observed to using eA3A-BE4(T44D+S45A) relative to eA3A-BE4 among the many CBE characteristics examined across thousands of target sites described herein, therefore this eA3A base editor variant was named eA3A-BE5.

[0843] Collectively, these data demonstrate that mutation of conserved phosphorylation targets in APOBEC family members can affect cytosine transversion byproducts of multiple cytosine base editors. While CDA-BE4 and evoA-BE4 demonstrate higher C⋅G-to-T⋅A purity than the EA-BE4 or eA3A-BE5, CDA-BE4 and evoA-BE4 have substantially larger editing windows and therefore offer low bystander precision, often making them less suited for precision editing applications (FIG. 7I). The optimal base editor choice for precision editing lies on a Pareto frontier that balances the relative risk of bystander versus transversion edits. EA-BE4 and eA3A-BE5 represent novel optimal CBEs that lay beyond the Pareto frontier defined by established base editors and provide narrow-window base editing with minimal cytosine transversion editing activity.

### Supplemental Information to Example 1

### Approach to Systematically Characterize Base Editing Activity

[0844] The assay's high sensitivity and large, minimally biased set of sequences enabled us to describe base editing windows with greater accuracy and generality. The comprehensive characterization library included all possible 6-mers surrounding a substrate A or C nucleotide at protospacer position 6, and all possible 5-mers spanning positions −1 to 13. Within this design series, a particular target sequence can contain more than one such 5-mer, enabling the compression of 11×45=11,264 designs into 2,496 sgRNA-target pairs.

[0845] Data across the library was collected to sensitively identify editing events with frequencies below 0.1%. This sensitivity was possible because a mutation event confidently identified at, for example, 10% frequency in one out of 1,000 target sites occurs at 0.01% frequency in aggregate. Maintaining a threshold of 50% or greater of their maximum frequency, windows of 4-8 for BE4 and 3-8 for evoA-BE4 were observed, consistent with previous reports (Komor et al., 2017a; Thuronyi et al., 2019), while BE4-CP ranges from 4-13 though it was previously estimated as 4-11 (Huang et al., 2019b). Similarly, at this 50% threshold, editing windows from position 5-7 for ABE and 4-9 for ABE-CP were observed, previously reported as position 4-7 and 4-12, respectively (Gaudelli et al., 2017). Editing windows at a 50% maximum activity were observed at threshold ranging position 1-10 for AID-BE4, 0-8 for CDA-BE4, and 5-8 for eA3A, compared to 3-7, 2-8, and 4-8, respectively (Gehrke et al., 2018; Nishida et al., 2016; Rees and Liu, 2018; Ren et al., 2018).

[0846] The definition of the typical editing window was broadened to a threshold of ≥30% to better include all positions that can undergo substantial base editing, though moderate base editing activity is still expected to occur outside this window as well. Across the comprehensive context library, ABE is a narrow window editor with typical editing activity spanning protospacer positions 4-8, while ABE-CP is a wide window editor that typically edits positions 3-11. BE4 has a narrow editing window from position 3-9, which was slightly increased by protein evolution in evoA-BE4, a narrow window editor ranging from 2-9. BE4-CP, AID-BE4 and CDA-BE4 are all wide window editors at 2-15, 1-11, and −1-9 respectively. eA3A-BE4 is a narrow window editor, with typical editing activity between protospacer positions 4-9, though a unique bimodal editing profile was noted with an additional peak in C⋅G-to-T⋅A editing at protospacer position 13 to up to 18% relative to eA3A-BE4's maximum positional editing frequency.

### Sequence-Activity Relationships for Common Base Editing Outcomes

[0847] While deaminase-specific sequence preferences have been reported to affect nucleotide conversion efficiencies of some base editors (Beale et al., 2004; Komor et al., 2016; Liu et al., 2018), sequence-activity relationships of base editors have not been characterized in depth. Resolution of base editing heteroduplex DNA intermediates containing deoxyuridine or deoxyinosine to a permanent edited product involves DNA repair pathways such as mismatch repair (MMR) and base excision repair (BER) (Pérez-Durán et al., 2012) that can also be influenced by local sequence context (Fishel, 2015; Jiricny, 2006; Mazurek et al., 2009). Base editing outcomes thus depend on target sequence in many potentially complex ways (Rees and Liu, 2018).

[0848] Sequence motifs were generated for various base editing activities by using logistic regression to predict activity from target sequence context and depict the learned weights as a sequence logo. The sign and weight of nucleotides in the logo depicts their contribution to activity; a weight of zero would indicate no change from the mean. To understand the relevance and strength of learned motifs, it is crucial to consider the motif's performance at predicting activity in sequences that were not used for training the motif models (held-out data), which were reported as Pearson's R or area under the receiver operator curve (AUC) for regression or classification tasks respectively.

[0849] First, sequence motifs were calculated for the efficiency of canonical base editing activity in which CBEs convert C⋅G to T⋅A and ABEs convert A⋅T to G⋅C. Motifs were obtained for each editor at ≥7,091 unique substrate nucleotides in their editing windows at ≥5,292 target sequences (FIG. 2C). Target sequence motifs were virtually identical to motifs calculated from the subset of the comprehensive context library with all 6-mers surrounding either C6 or A6 (FIGS. 10A-10B) and were consistent across cell types and biological replicates (FIG. 10C). These findings identify sequence context as an important determinant of editing activity across all editors with the exception of CDA-BE4, for which only 5.3% of the variance in editing efficiency is explained by target motifs in held-out sequences, compared to 15-32% on average across all other base editors.

### Deaminase and Sequence Context Affect Editing of Proximal Substrate Nucleotides

[0850] Deaminase enzymes and base editors tested here have been described as having varying degrees of processivity, the ability to sequentially catalyze multiple base conversions without releasing the target DNA (Gaudelli et al., 2017; Komor et al., 2016a; Love et al., 2012; Nishida et al., 2016; Pham et al., 2003). rAPOBEC1 CBEs such as BE4 and ABE base editors have been described as processive, while CDA-BE4 and eA3A-BE4 are thought not to be processive. Base editing processivity may be reflected in equilibrium scores, the ratio between observed frequency of two substrate nucleotides in a single substrate both being editing and the expected frequency of both nucleotides being edited together assuming statistical independence. Values above one indicate a preference for editing both or neither nucleotide over having only one or the other edited, consistent with processive base editing. Disequilibrium scores were calculated for the eight CBEs and ABEs using data from 614 to 4,796 pairs of substrate nucleotides in the editing windows of 390 to 1,413 target sequences in the comprehensive context library.

[0851] From this analysis, disequilibrium scores of 1.04 to 1.23 were observed across all CBEs, and 0.86 for ABE and 0.73 ABE-CP on average, FIG. 3F and FIGS. 13C-13D), contrary to prior observations demonstrating positive processivity of late-stage ABEs (Gaudelli et al., 2017). It was noted that disequilibrium scores calculated in this manner are unavoidably confounded by local sequence context preferences, such as ABEs dislike of AA contexts. While this model predicts that the disequilibrium scores for ABEs should increase for non-sequential adenines, only low levels of disequilibrium score increase were observed for ABE and ABE-CP at substrate nucleotides spaced more than one nucleotide apart.

[0852] Interestingly, it was observed that sequence context contributes more strongly to disequilibrium scores than the choice of deaminase. Many pairs of substrate nucleotides were observed with disequilibrium scores both >1 and <1 among different tested base editors. Among CBEs, eA3A-BE4 was particularly susceptible to sequence context, and demonstrated the greatest disequilibrium score of narrow-window editors in a sequence-dependent manner. Mild to no change in disequilibrium score was observed for most base editors as the substrate nucleotide pair distance varied from 1 to 8 bp apart.

[0853] Together, these data demonstrate that processive action of base editor deaminases at on-target sites, measured as joint editing probability, are a combined function of deaminase enzyme, activity range, and sequence context.

### Base Editing Model Design

[0854] A model to inform the design of base editing experiments including all possible choices of base editors, sgRNAs, and targets to enable a desired phenotype (FIG. 3A) was sought. Such a method should flexibly support user-specified definitions of desirable and undesirable editing outcomes: for example, in many base editing applications, “bystander editing” of non-target C or A nucleotides located near the target C or A are silent in the context of the translated amino acid sequence, yielding a multitude of desirable genotype edits. The design method should consider editing efficiency, sequence preferences for various editing outcomes and likelihood of bystander edits, each of which vary by base editor. To achieve these goals, two machine learning models were trained. The “editing efficiency model” takes a user-provided target sequence and base editor as input and uses gradient-boosted regression trees to predict an editing efficiency z-score which can be interpreted into a predicted fraction of sequenced reads containing base editing activity. The “bystander editing model” takes a user-provided target sequence and base editor as input and uses a deep conditional autoregressive model to predict the frequency of combinations of base editing outcomes at all substrate nucleotides among edited reads. For both model types, distinct models were trained on data from the library assay for each editor and cell type.

[0855] The relationship between sequence and base editing efficiency was investigated using the comprehensive context library across two biological replicates in each of three cell types. Sequence motif models were trained, and it was found that the learned motifs (FIG. 12E) resemble a combination of each editor's single-nucleotide sequence motif and activity window. Preferences for purines at position 20 related to sgRNA loading into Cas9 (Wang et al., 2014) and for G at position 0 were observed, indicating that 21 nt spacers that were extended with a 5′ G for the purpose of U6 promoter expression enable more efficient editing when all 21 nucleotides are complementary to the target than when the 5′ G is a mismatch, similar to observations in high-fidelity Cas9-variants (Kleinstiver et al., 2016).

[0856] To predict bystander base editing patterns, a deep conditional autoregressive model was designed (Van Den Oord et al., 2016) that uses an input target sequence surrounding a protospacer and PAM to output a frequency distribution on combinations of base editing outcomes (FIG. 3D), and trained the model on data from up to 10,638 sgRNA-target pairs in the comprehensive context library which were randomly split in an 8:1:1 ratio into training, validation, and test data sets. The model predicts all nucleotide substitutions from protospacer positions −10 to 20. The model learns sequence motifs with higher-order interactions by providing each substrate nucleotide and its surrounding nucleotides to a deep neural network which were referred to as an “encoder”. This series of encodings are decoded one by one using a “decoder” deep neural network. For each encoding (representing a substrate nucleotide), the decoder outputs a distribution of base editing outcomes. The decoder acts autoregressively, meaning it decodes an encoding while using all previously decoded outputs in the series as input.

[0857] To flexibly model editing profiles with any shape, a learned positional bias towards producing an unedited outcome was introduced. Importantly, the model can learn to capture any possible distribution of editing outcomes, and thus can learn the editing patterns of any base editor from sufficient editing outcome data. An architecture search, ablation analysis, and comparisons to baseline methods (STAR methods) were performed, and it was concluded that the autoregressive design and using a high-capacity decoder were important for predictive performance. Across the six CBEs and two ABEs tested here, the bystander model performed strongly at predicting the frequencies of bystander editing patterns, achieving a median R=0.86-0.99 on ≥606 held-out target sequences in mES cells (FIG. 3E and FIGS. 12H-12I). The model retained strong performance even at target sites with many substrate nucleotides (FIGS. 13A-13B). The large variance in disequilibrium scores of base editors (FIG. 3F and FIGS. 13C-13D; Supplementary Information) was accurately predicted by the bystander model (R=0.71 and 0.74 for BE4 and eA3A-BE4), demonstrating that it has learned higher-order conditional editing probabilities.

[0858] The editing efficiency and bystander editing models were collectively named “BE-Hive”. Using target sequence as input alone, BE-Hive estimates base editing efficiency and outcomes at the single-nucleotide and coding-level. BE-Hive represents the first tool for designing base editing experiments that comprehensively considers on-target editing efficiency, deaminase and sequence related preferences for various editing outcomes, and the likelihood of bystander edits to distinguish targets that are amenable to high-precision single-nucleotide editing and coding-sequence correction using a variety of established base editors (FIG. 3G).

Characterization of Indels Resulting from Base Editing

[0859] To date, indels resulting from base editing activity have remained poorly characterized. During cytosine base editing, rare indels may result from DNA nicking by the HNH nuclease domain on the protospacer-bound DNA strand and abasic site generation at deaminated cytosines through UNG-mediated excision of uracil, which can convert to a DNA strand break spontaneously or during base excision repair. During adenine base editing, deoxyinosine can be recognized by enzymes such as alkyl-adenine DNA glycosylase (AAG) and excised to facilitate base excision repair (Lau et al., 2000), although, AAG has been reported to have little activity on ssDNA (Hitchcock et al., 2004; Saparbaev and Laval, 1994). ABE-mediated adenine deamination products therefore may convert to abasic sites less frequently than CBE deamination products, which may explain why indels occur less frequently than in cytosine base editing (Gaudelli et al., 2017).

[0860] In order to sensitively identify indel activity, data was surveyed at a subset of target sequences (N>19,925) per editor in HEK293T cells, U2OS cells, and mESC cells with high read count, and adjusted for batch effects with two-way ANOVA. In untreated library cells, 1-bp variations from designed sequences were observed, presumably attributable to errors in synthesis, PCR amplification, and HTS. This noise was corrected for by comparing treatment library data to untreated library data and data from endogenous contexts (STAR methods, FIGS. 11B-11E). Among cell types, a 1.2-fold increase in BE:indel ratio in HEK293T cells, and 2.1-fold increase in U2OS cells relative to mESCs was observed, although neither of these differences were statistically significant (FIG. 11D). These results suggest a minor role for cell type differences in affecting the ratio of BE:indel outcomes.

[0861] Wide-window editors induced indels at a lower relative frequency than narrow-window editors in both CBEs and ABEs (FIG. 2G and FIG. 11E). An average geometric mean BE:indel ratio of 129:1 for ABE and 37:1 in narrow-window CBEs, and 166:1 for ABE-CP and 46:1 in wide-window CBEs, was detected representing typical indel frequencies of 0.2% and 0.5% in ABEs and CBEs, respectively. A weak relationship was observed between target sequence and frequency of indels resulting from base editing reflected by low replicate consistency of BE:indel ratios at matched target sites (IQR R=0.13 to 0.29 across editors in mES cells, P<3.8×10-3). Overall, the comprehensive characterization of BE:indel ratios confirmed the rarity of undesired indel events by base editors.

[0862] The indel outcome analysis revealed a characteristic profile of indels that result from base editing. Deletions resulting from cytosine base editing were most frequently centered around the PAM-proximal Cas9 HNH domain's nick locations preceding position 18, the PAM-distal deamination peak position for a given editor (often position 6), or spanning these two sites resulting in a peak in outcome frequency at ˜12 bp deletions (FIG. 2H and FIG. 12A), consistent with the understanding of the processes that give rise to indel events. However, the peak position of PAM-distal deletions that arise from deamination events did not always mirror the distribution of deamination activity in the editing window of all editors. While the BE4-CP editing window ranges from position 2-15 with peak editing at the central position 8, indels resulting from cytosine deamination were offset towards the PAM. Interestingly, cytosine transversion mutations induced by BE4-CP are likewise shifted in their location towards the PAM (FIGS. 1B-1I), consistent with a model in which both indel formation and C⋅G-to-G⋅C and C⋅G-to-A⋅T mutations arise from repair of abasic lesions following uracil excision.

[0863] The rare insertion outcomes from base editing are distinct from typical Cas9 nuclease-induced insertion products (Shen et al., 2018). Base editor-mediated insertions occurred primarily at the Cas9 HNH nick for both ABEs and CBEs, and were separable into three classes that occurred at approximately equal frequency: first, duplications of a single nucleotide, comprising 25-35% of insertions; second, a single repeat of two or more nucleotides from the native sequence context at 33-34%; and third, insertions of two or more nucleotides that do not correspond to duplications of the native sequence context, comprising 30-36% of insertions (FIG. 2I and FIG. 12B). In Cas9-genome editing, insertion genotypes are heavily dominated by 1-bp insertion products that are frequently a duplication of the nucleotide immediately 5′ of the double-strand break (DSB) site (Allen et al., 2019; Shen et al., 2018). Base editor-induced insertions appeared to be consistent with Cas9-nuclease insertion mutations in that they often duplicate the sequence 5′ of the HNH nick, though more typically consist of longer duplicated regions. Cas9 DSB-mediated 1-bp insertions are thought to arise from occasional staggered cutting which causes a 3′-overhang that is filled in by DNA-polymerase and ligated by non-homologous end joining (Lemos et al., 2018; Richardson et al., 2016; Shou et al., 2018; Zuo and Liu, 2016). Although this same mechanism cannot explain insertions that arise from base editing, it is tempting to speculate that longer 3′-overhangs resulting from base editing-induced abasic lesions and HNH nick activity may similarly contribute to insertion outcomes.

[0864] Cytosine transversion outcomes of base editing also arise from UNG-mediated abasic sites and were enriched at RCTA motifs (FIGS. 2D-2E); however, strong sequence determinants of indels that result from base editing were not observed. Sequence motifs were trained to predict BE:indel ratio from target sequence and identified a minor association of indels with adenine and thymine relative to cytosine and guanine (FIG. 12C). Overall these motifs performed weakly, explaining only 1-7% of the variation in BE:indel ratios in held-out sequences (P<7.0×10⁻³¹). Indels resulting from base editing may depend on the Cas9 component. A mild improvement in BE:indel ratio by base editing with NG-fused eA3A-BE4 overall (45:1) was noted, relative to eA3A-BE4 (43:1). The engineered Cas9-NG is reported to have lower activity than wild-type SpCas9 protein, similar to high-fidelity Cas9 variants that have reduced binding strength relative to wild-type Cas9, which may underlie this variability (Nishimasu et al., 2018).

[0865] These analyses provide the first comprehensive characterization of indels that result from base editing. The relative rarity of indels resulting from base editing by ABEs and CBEs was confirmed, and observed a minimal role for cell type, sequence context, and Cas9 component in determining their frequency. A characteristic profile of indels that result from base editing that is consistent with a model based on HNH-nicking and abasic site generation following deamination was discovered. Collectively, these findings suggest that rare base editor-induced indels may arise through similar, yet distinct mechanisms from Cas9 nuclease-induced indels.

### Model-Guided Design for Precise Base Editing Correction of Pathogenic Alleles

[0866] Optimal base editor choice for induction of a desired edit depends on sequence preferences and base editor position with respect to the substrate nucleotide. An increase in the number of editable nucleotides exponentially expands the combinatorial space of potential outcomes at a given target, further complicating experimental design for precision editing applications. Across the six CBEs and two ABEs tested here, BE-Hive performed strongly with a median R=0.86-0.99 on 606 or more held-out target sequences (FIG. 3E). Mild reductions were observed in performance with increasing numbers of proximal substrate nucleotides and editor window size, achieving a median R=0.98 and R=0.90 at held-out target sites with two and five substrate nucleotides in positions 1-12, respectively (FIG. 4B).

[0867] The ways in which sequence composition affects single-nucleotide editing precision of ABEs and CBEs was unvestigated by considering subsets of SNP alleles in which the umber and position of substrate nucleotides in the editing window was controlled. For example, BE4 editing activity at 31 disease-related SNPs was investigated with a fixed cytosine at positions 3 and 5 with no other cytosines (IUPAC code D) in positions 2-10 (C3 and C5 mask) and observed a large amount of variation in single-nucleotide correction precision ranging from 5.6% to 93%, as predicted by BE-Hive (R=0.94, FIG. 4E). ABE demonstrated similar variability; for example, in editing of 136 disease-related alleles in the ABE precision editing SNP library in mES cells masked on A6 and A8, single-nucleotide correction precision ranging from 0% to 99% was observed, as predicted by BE-Hive (R=0.71, FIG. 4F). These analyses affirm that single-nucleotide precision is factor to more than the number and activity window position of substrate nucleotides. Sequence determinants that may appear relatively weak at single substrate nucleotides can combine into stronger sequence determinants when considering combinations of editing events.

[0868] Differences in base editor sequence preference result in variability in precision editing of target sites with multiple substrates (FIGS. 4G-4H). To illustrate this, eA3A-BE4 and BE4 editing in the CBE precision editing SNP library in mES cells was compared at two C7 SNP alleles—one for tetrameric protein transthyretin gene (TTR) involved in transthyretin amyloidosis (OMIM 105210), and one in the transmembrane protein 127 gene (TMEM127) related to pheochromocytoma (OMIM 171300)—where C4 and C7 are the only cytosines among positions 2-10. Single-nucleotide correction precision of 74% in TTR and 16% at TMEM127 by BE4 editing was observed, while eA3A-BE4 corrected both alleles at 91% and 90% precision, respectively. BE4's relative dislike of the GC motif at C4 compared to the AC motif at C7 may explain the high precision achieved in TTR editing and the lower precision in TMEM127 where both target and bystander nucleotide share the disfavored GC motif, however, eA3A-BE4 disfavors both these dinucleotide motifs equally and induced high precision edits in both alleles. The variability in precision editing is therefore dependent, but not fully explained by the deaminase dinucleotide preferences described in the literature, but is accurately captured by BE-Hive (R=0.96). While C4 and C7 both lie within the canonical editing window of eA3A-BE4, the average editing efficiency at position 7 is nearly double that of position 4. This finding agrees with, though is disproportionate to the heavy bias for precise editing of C7 in both TTR and TMEM.

[0869] Moreover, vastly different editing precision outcomes were observed even at sites with identical dinucleotide motifs and substrate position. In the myosin heavy chain beta gene (MYH7) SNP allele related to cardiac disease (Tajsharghi et al., 2003), and the glutamate ionotropic receptor NMDA type subunit 2B gene (GRIN2B) SNP allele related to a number of neurodevelopmental disorders (Hu et al., 2016), the target cytosine at position 7 lies within the disfavored AC context and the position 4 bystander cytosine is preceded by T, yet editing precision of C7 varied from 28% at MYH7 to 0% at GRIN2B. These data suggest that precision base editing relies on a complex relationship between the position of target and bystander nucleotides and base editor sequence preference that is not easily interpreted from window and dinucleotide preference alone.

[0870] In some cases, optimal base editor choice can even be counterintuitive. For example, at three targets with a pathogenic SNP at positions C5 or C7—the fibroblast growth factor receptor 1 gene (FGFR1) underlying Kallman syndrome (Dode et al., 2003), the growth differentiation factor 1 gene (GDF1) related to congenital heart defects (OMIM 613854), and in the polycystin 1 gene (PKD1) related to polycystic kidney disease—BE4-CP had higher genotype correction precision than any other CBE, even when additional cytosines were present within its wide editing window.

[0871] Bystander mutations at on-target sites may be innocuous [symbol] for example when they induce a silent mutation in a protein-coding gene, which is estimated to occur with 47% probability for CBEs with a 5-nt window and 38% for ABEs with a 4-nt window (Rees and Liu, 2018) [symbol] or deleterious if they introduce unwanted functional changes in protein coding or regulatory regions. Functionality was added to BE-Hive to predict changes to amino acid sequences following base editing to help further distinguish favored from unfavored edited outcomes (FIG. 3A and FIG. 3G).

### Sequence Features Partially Determine Rare CBE-Outcomes

[0872] The occurrence of rare base editing outcomes varies by base editor, cell type, and target site. Both cytosine transversion byproducts and indels that result from CBEs are thought to arise from abasic lesions induced by UNG (Komor et al., 2016). The sequence motif describing uracil excision from double-stranded DNA (dsDNA) by UNG-family members in vitro is approximated as WCAW, and in the context of somatic hypermutation (SHM) UNG demonstrates a preference for inducing transversions at deaminated WGCT and transitions at WACT motifs (Pérez-Durán et al., 2012). These motifs differ substantially from the RCTA motif observed in the analysis to enrich for cytosine transversion events (FIGS. 2D-2E and FIG. 11A). Thus, native UNG preferences are weak predictors of cytosine transversion outcomes that result from CBE editing. An assessment of the contribution of sequence context in determining specific CBE-mediated cytosine conversion to G and A, its potential utility in editing disease-relevant SNVs, and the ability of BE-Hive to accurately predict these events, were sought.

[0873] It was found that while an RCTA motif (test R=0.63) is predictive of C⋅G-to-G⋅C conversion, a looser and weaker RC motif (test R=0.39) is predicted to predispose sites to C⋅G-to-A⋅T outcomes (FIG. 5A). These findings suggest that sequence features not only affect the ratio of CBE-mediated cytosine transition versus transversion outcomes but may also determine the specific transversion product. The significance of these sequence features was experimentally assessed using a library of 3,400 sgRNA-target pairs predicted to induce 8.5%-78% precise single-nucleotide C⋅G-to-G⋅C conversion, and 400 sgRNA-target pairs to induce 5.9%-30% C⋅G-to-A⋅T conversion among edited outcomes by eA3A-BE4 and eA3A-BE4-NG editing, which was collectively named the “transversion-enriched SNV library”. For technical reasons, the library contained 35-nt and 61-nt target sites, but base editing outcomes were highly consistent between target sites of differing length that represented the same sequence contexts (median R=0.96; FIG. 14A). Higher cytosine transversion purity in mES cells was observed in this library, averaging 25% by eA3A-BE4-NG, compared to 12% by eA3A-BE4 in the comprehensive context library (P=2.7×10-93, Welch's T-test, N=2,440 versus 5,282 substrate nucleotides; FIG. 5B) and compared to approximately 3% on average across all other CBEs tested. These results indicate that BE-Hive learned sequence features that determine cytosine transversion outcomes of cytosine base editing.

[0874] Whether CBE-mediated cytosine transversions co-segregate with indels and observed no meaningful relationship between cytosine transversion purity and BE:indel ratio by eA3A-BE4-NG editing as also explored (R=−0.02, P=0.2, N=4,320 target sites; FIG. 5C). These data suggest that sequence contexts with enriched transversion product purities enrich for specific resolution of abasic intermediates towards transversion edits, rather than merely increasing abasic site formation by promoting base excision that would increase the frequency of both outcomes.

[0875] Taken together, these data establish the importance of sequence context in determining both the frequency and the identity of repair products that arise from abasic intermediates of cytosine base editing. Target sequences predicted by BE-Hive greatly enriched C⋅G-to-G⋅C and C⋅G-to-A⋅T outcomes from cytosine base editing of disease-associated alleles without increasing indels.

### Deaminase Enzymes Partially Determine Rare CBE Repair Outcomes

[0876] Indels and transversions have previously been noted as byproducts of CBE editing, however, factors that determine their frequency have not been investigated beyond the fusion of UGI and Mu Gam to diminish these outcomes (Komor et al., 2016b, 2017a; Nishida et al., 2016). Analyses of the comprehensive context library revealed that these rare outcomes varied somewhat by cell type. The purity of cytosine transversions resulting from CBE editing was elevated in mESCs compared to HEK293T and U2OS (mean of 2.8-16% of edited reads across CBEs in mESCs, compared to 2.6-9.5% in HEK293T and 1.6-7.7% in U2OS) and was accompanied by a slight increase in indels (1.3-fold and 2.1-fold relative to HEK293T and U2OS, respectively). This difference may be explained by elevated UNG in mESCs, which facilitates deoxyuracil excision to create an abasic site (Wu et al., 2013) that is an intermediate of transversion and indel formation.

[0877] Aside from cell type differences, cytosine product purities were also dependent on the CBE's cytidine deaminase. Targets with multiple editable cytosines were previously noted to yield C⋅G-to-T⋅A edits with greater purity than targets with only a single editable cytosine (Komor et al., 2017a), which predominantly relates to CBE window. Indeed, the base editor sequence-activity analysis confirmed that wide-window CBEs tended to have higher C⋅G-to-T⋅A product purities (Spearman r=−0.81, P=0.05, N=6 CBEs), yet, activity window size alone did not explain the variance in the frequency of rare outcomes among CBEs.

[0878] Additional factors that may affect CBE product purity were investigated, and it was found that rare outcomes of cytosine base editing appear non-uniform among fused deaminases. Transversion outcomes occurred at 4-fold higher frequency following eA3A-BE4 editing compared all other CBEs tested (approximately 12% compared to 3% average, respectively; FIGS. 1B-1I), and C⋅G-to-G⋅C outcomes were enriched relative to C⋅G-to-A⋅T conversion (˜3:1 for eA3A, compared to ˜3:2 mean for remaining CBEs). Editors that display the lowest frequency of cytosine transversion mutations include the narrow-window editor evoA-BE4 and the wide-window editor CDA-BE4 (FIGS. 1B-1I); however, these editors also displayed the lowest BE:indel ratios of their window classes (32:1 and 39:1, respectively). These findings strongly suggest that the deaminase components of CBEs not only create uracil products, but also play an additional, previously unrecognized role in the partitioning of outcomes that result from U⋅G mismatch repair.

### DISCUSSION

[0879] The abundance of base editors designed for the same basic task of either C⋅G-to-T⋅A mutation (CBEs) or A⋅T-to-G⋅C mutation (ABEs) complicates selection of the optimal tool for precision editing at a locus of interest. High-throughput base editing approaches to install disease-relevant SNVs or sgRNA-tiling of gene-regions holds promise for dissecting the functional role of sequences with fine granularity, and genome-wide perturbation by base editing has been shown to be less deleterious to cells than similar SpCas9-based screens (Hart et al., 2015; Koike-Yusa et al., 2013; Kuscu et al., 2017; Rajagopal et al., 2016; Shalem et al., 2014; Wang et al., 2014). High-throughput SpCas9-based screens often rely on sgRNA-input as a proxy for editing that occurs in the genome. The uncertainty regarding base editing outcomes, therefore, makes them less well-suited for such screens and high-throughput studies using base editors have remained limited (Kweon et al., 2019).

[0880] It was shown that base editing precision and efficiency are highly dependent on both editor and sequence context and frequently cannot be predicted from the target locus and known base editor characteristics by simple inspection. Comprehensive and systematic analysis of sequence and deaminase determinants of base editing outcomes has allowed us to build a suite of machine learning models to predict the genotypes resulting from base editing with high accuracy (R≈0.89), that can facilitate better design of base editing sgRNA targeting libraries to obtain expected genotypes. Predictable high-throughput base editing could further enable novel whole-genome assays to study disease-relevant sequence variations by massively parallel insertion of SNVs found in genome-wide association studies (GWAS) or to investigate the functional role of cancer point mutations (Bailey et al., 2018; Brown et al., 2019; Pardinas et al., 2018; Stahl et al., 2019).

[0881] Using the wealth of base editing data generated herein, the similarities and differences that define each editor were explained and insight was gained into the processes that take place in generating base editing outcomes. Apparent G⋅C-to-A⋅T editing was observed upstream of the sgRNA binding site, cytosine editing by ABEs, and identified sequence context as a driving force behind partitioning repair products of cytosine base editing which enabled us to identify cytosine transversion SNVs amenable to CBE-mediated correction by C⋅G-to-G⋅C and C⋅G-to-A⋅T conversion. Further, a new role for deaminase components of CBEs in affecting repair of deaminated cytosines was established. Collectively, these findings suggest a complex interaction of base editors, DNA repair proteins, and local sequence context that together determine the resulting edited product of base editing. It was demonstrated that the mutation of deaminase components of base editors can affect the relative frequency of cytosine base editing outcomes to either enrich or reduce transversions, suggesting that further engineering of base editors may uncover novel functionality to direct edits beyond the canonical by C⋅G-to-T⋅A editing by CBEs and A⋅T-to-G⋅C editing by ABEs with higher precision and efficiency.

[0882] Collectively, the extensive and minimally biased characterization of editing outcomes performed in this work provides both refined and novel insights into base editor functionality, advancing the scope, biological understanding, effectiveness, and precision of base editing.

### Star Methods

TABLE 1
Key Resources Table

| | | |
|---|---|---|
| REAGENT or RESOURCE | SOURCE | IDENTIFIER |

Bacterial and Virus Strains

| | | |
|---|---|---|
| NEB® 10-beta Competent E. coli | New England Biolabs | CAT#C3019H |

Chemicals, Peptides, and Recombinant Proteins

| | | |
|---|---|---|
| Lipofectamine 3000 | Thermo Fischer Scientific | CAT#L3000015 |
| Hygromycin B | Thermo Fischer Scientific | CAT#10687010 |
| Blasticidin | Thermo Fischer Scientific | CAT#A1113903 |
| Puromycin | Thermo Fischer Scientific | CAT#A1113803 |
| SspI-HF | New England Biolabs | CAT#R3132L |
| BbsI | New England Biolabs | CAT#R0539L |
| XbaI | New England Biolabs | CAT#R0145L |

Critical Commercial Assays

| | | |
|---|---|---|
| DNeasy Blood & Tissue Kit | QIAGEN | CAT#69504 |
| QIAquick PCR & Gel Cleanup Kit | QIAGEN | CAT#28506 |
| QIAquick PCR Purification Kit | QIAGEN | CAT#28104 |
| ZymoPURE™ II Plasmid Maxiprep Kit | Zymo Research | CAT#D4202 |
| NEBNext Ultra II Q5 Master Mix | New England Biolabs | CAT#M0544L |
| Gibson Assembly Master Mix | New England Biolabs | CAT#E2611L |
| Plasmid-Safe ATP-Dependent DNase | Lucigen | CAT#E3110K |
| TapeStation DNA ScreenTape & Reagents | Agilent | CAT#5067-5582, |
| | | 5067-5583 |
| KAPA Library Quantification Kit | KAPA Biosystems | CAT#KR0405 |
| NextSeq 500/550 High Output Kit | Illumina | CAT#20024907 |
| Miseq reagents kit v3 | Illumina | CAT#MS-102-3001 |

Deposited Data

| | | |
|---|---|---|
| Sequencing data | This study | PRJNA591007 |
| Processed editing efficiency data | This Example | doi.org/10.6084/ |
| | | m9.figshare.10673816 |
| Processed bystander editing data | This Example | doi.org/10.6084/ |
| | | m9.figshare.10678097 |

Experimental Models: Cell Lines

| | | |
|---|---|---|
| HEK293T | ATCC | CAT#-CRL-3216 |
| U2OS | ATCC | CAT#HTB-96 |
| P2L-mESC | Shen et al. 2018 | |

Oligonucleotides

| | | |
|---|---|---|
| Library cloning primer-Oligonucleotide | This Example | N/A |
| library Fw: | | |
| TTTTTGTTTTGTCTGTGTTCCGTTGTCCGTGCTG | | |
| TAACGAAAGgtgcagtNNNNNNNNNNNNNNN | | |
| GATGGGTGCGACGCGTCAT (SEQ ID NO: | | |
| 3257) | | |
| Library cloning primer-Oligonucleotide | This Example | N/A |
| library Rv: | | |
| GTTGATAACGGACTAGCCTTATTTAAACTTGCT | | |
| ATGCTGTTTCCAGCATAGCTCTTAAAC (SEQ ID | | |
| NO: 3258) | | |
| Library cloning primer-Circular donor Fw: | This Example | N/A |
| GTTTAAGAGCTATGCTGGAAACAGC (SEQ ID | | |
| NO: 3259) | | |
| Library cloning primer-Circular donor Rv: | This Example | N/A |
| ACTGCACCTTTCGTTACAGCACGGACAACGGA | | |
| ACACAGACAAAACAAAAAAGCACCGACTC | | |
| (SEQ ID NO: 3260) | | |
| Library cloning primer-Plasmid insert Fw: | This Example | N/A |
| TAACTTGAAAGTATTTCGATTTCTTGGCTTTAT | | |
| ATATCTTGTGGAAAGGACGAAACACCG (SEQ | | |
| ID NO: 3261) | | |
| Library cloning primer-Plasmid insert Rv: | This Example | N/A |
| TTGTGGTTTGTCCAAACTCATCAATGTATCTTA | | |
| TCATGTCTGCTCGAAGCGGCCGTACCTCTAGA | | |
| CACTCTTTCCCTACACGACGCTCTT (SEQ ID | | |
| NO: 3262) | | |
| Library sequencing primer-PCR1 Fw + | This Example | N/A |
| [Illumina BC]: | | |
| AATGATACGGCGACCACCGAGATCTACAC | | |
| [Illumina BC]ACACTCTTTCCCTACACGAC | | |
| (SEQ ID NO: 3263) | | |
| Library sequencing primer-PCR1 Rv: | This Example | N/A |
| GTGACTGGAGTTCAGACGTGTGCTCTTC | | |
| CGATCT GTGGAAAGGACGAAACACCG (SEQ | | |
| ID NO: 3264) | | |
| Library sequencing primer-PCR1 Fw: | This Example | N/A |
| AATGATACGGCGACCACCGAGATCTACAC | | |
| (SEQ ID NO: 3265) | | |
| Library sequencing primer-PCR2 Rv + | This Example | N/A |
| [Illumina BC]: | | |
| CAAGCAGAAGACGGCATACGAGAT[Illumina | | |
| BC]GTGACTGGAGTTCAGACGTGTGCTCTTC | | |
| (SEQ ID NO: 3266) | | |
| HEK2 sgRNA protospacer: | This Example | N/A |
| GAACACAAAGCATAGACTGC (SEQ ID NO: | | |
| 3267) | | |
| HEK3 sgRNA protospacer: | This Example | N/A |
| GAACACAAAGCATAGACTGC (SEQ ID NO: | | |
| 3267) | | |
| HEK4 sgRNA protospacer: | This Example | N/A |
| GGCACTGCGGCTGGAGGTGG (SEQ ID NO: | | |
| 3268) | | |
| b04 sgRNA protospacer: | This Example | N/A |
| GGCGTACTCCATGACAAAGC (SEQ ID NO: | | |
| 3269) | | |
| EMX sgRNA protospacer: | This Example | N/A |
| GAGTCCGAGCAGAAGAAGAA (SEQ ID NO: | | |
| 3270) | | |
| HEK2 Sequencing primer Fw: | This Example | N/A |
| CCAGCCCCATCTGTCAAACT (SEQ ID NO: | | |
| 3271) | | |
| HEK2 Sequencing primer Rv: | | |
| TGAATGGATTCCTTGGAAACAATGA (SEQ ID | | |
| NO: 3272) | | |
| HEK3 Sequencing primer Fw: | | |
| ATGTGGGCTGCCTAGAAAGG (SEQ ID NO: | | |
| 3273) | | |
| HEK3 Sequencing primer Rv: | | |
| CCCAGCCAAACTTGTCAACC (SEQ ID NO: | | |
| 3274) | | |
| HEK4 Sequencing primer Fw: | | |
| GAACCCAGGTAGCCAGAGAC (SEQ ID NO: | | |
| 3275) | | |
| HEK4 Sequencing primer Rv: | | |
| TCCTTTCAACCCGAACGGAG (SEQ ID NO: | | |
| 3276) | | |
| b04 Sequencing primer Fw: | | |
| GTCTGGTGCCATGGAGAGTAG (SEQ ID NO: | | |
| 3277) | | |
| b04 Sequencing primer Rv: | | |
| GGTATCAGGCGACGTGGTAT (SEQ ID NO: | | |
| 3278) | | |
| EMX Sequencing primer Rv: | | |
| CAGCTCAGCCTGAGTGTTGA (SEQ ID NO: | | |
| 3279) | | |
| EMX Sequencing primer Rv: | | |
| CTCGTGGGTTTGTGGTTGC (SEQ ID NO: 3280) | | |

Recombinant DNA

| | | |
|---|---|---|
| Tol2 trasposase | Shen et al. 2018 | Tol2 |
| p2Tol-U6-2xBbsI-sgRNA-HygR | Arbab et al. 2018 | Addgene #71485 |
| p2T-CAG-SpCas9-BlastR | Arbab et al. 2018 | Addgene #107190 |
| p2T-CMV-ABEmax-BlastR | This Example | ABE |
| p2T-CMV-ABEmax-CP1041-BlastR | This Example | ABE-CP |
| p2T-CMV-BE4max-BlastR | This Example | BE4 |
| p2T-CMV-BE4max-CP1028-BlastR | This Example | BE4-CP |
| p2T-CMV-AIDmax-BlastR | This Example | AID-BE4 |
| p2T-CMV-CDAmax-BlastR | This Example | CDA-BE4 |
| p2T-CMV-evoAPOBEC1max-BlastR | This Example | evoA-BE4 |
| p2T-CMV-eA3Amax-BlastR | This Example | eA3A-BE4 |
| p2T-CMV-eA3Amax-NG-BlastR | This Example | eA3A-BE4-NG |
| p2T-CMV-eA3Amax-T31A-NG-BlastR | This Example | eA3A-NG(T31A) |
| p2T-CMV-BE4max-H47E + S48A-BlastR | This Example | EA-BE4 |
| p2T-CMV-eA3Amax-T44D + S45A-BlastR | This Example | eA3A-BE5 |

Software and Algorithms

| | | |
|---|---|---|
| Code repository for data processing | This Example | github.com/ |
| | | maxwshen/lib- |
| | | dataprocessing |
| Code repository for data analysis | This Example | github.com/maxwshen/ |
| | | lib-analysis |
| Code repository for the editing | This Example | github.com/maxwshen/ |
| efficiency model | | be_predict_efficiency |
| Code repository for the bystander | This Example | github.com/maxwshen/ |
| editing model | | be_predict_bystander |
| Theseus | Theobald et al. 2012 | |

### Methods

### Library Cloning

[0884] The cloning process is as reported in Shen et al. 2018, with minor changes. In brief, the process involves ordering a library of 2,000 to 12,000 oligonucleotides pairing an sgRNA protospacer with its 35-nt, 56-nt or 61-nt target site, centered on an NGG or NG PAM, as specified. Pools were amplified with NEBNext Ultra II Q5 Master Mix (New England Biolabs) with initial denaturation and extension times extended to 2 minutes per cycle for all PCR reactions to prevent skewing towards GC-rich sequences. To insert the sgRNA hairpin between the sgRNA protospacer and the target site, the library undergoes an intermediate Gibson Assembly circularization step, restriction enzyme linearization and Gibson Assembly into a plasmid backbone containing a U6 promoter to facilitate sgRNA expression, a hygromycin resistance cassette and flanking Tol2 transposon sites to facilitate integration into the genome. Purified plasmids were transformed into NEB10beta (New England Biolabs) electrocompetent cells. Following recovery, a small dilution series was plated to assess transformation efficiency and the remainder was grown in liquid culture in DRM medium overnight at 37° C. with 100 ug/mL ampicillin. The plasmid library was isolated by Midiprep plasmid purification (Qiagen). Library integrity was verified by restriction digest with SapI (New England Biolabs) for 1 hour at 37° C., and sequence diversity was validated by deep sequencing as described below.

### Cloning

[0885] Base editor plasmids were constructed by inserting a blasticidin resistance expression cassette from a p2T-CAG-SpCas9-BlastR plasmid (107190) (Arbab et al., 2015) downstream of the bGH-polyA terminator into a BE4 plasmid (100802) (Komor et al., 2017). Tol2-transposase sites from p2T-CAG-SpCas9-BlastR were cloned to flank the base editor and antibiotic selection cassettes. All editors described in this Example were cloned between the N-terminal and C-terminal NLS sequences flanking BE4. The full sequence of the p2T-CAG-BE4max-BlastR plasmid and editor sequences for all editors used in this Example is appended in the ‘Sequences’ section.

[0886] Individual SpCas9 sgRNAs were cloned as a pool into a Tol2-transposon-containing gRNA expression plasmid (Addgene 71485) using BbsI plasmid digest and Gibson Assembly (New England Biolabs). Protospacer sequences and gene specific primers used for amplification followed by HTS are listed in the Primers Table.

### Cell Culture

[0887] mESC lines used have been described previously and were cultured as described previously (Sherwood et al., 2014). HEK293T and U20S cells were purchased from ATCC and cultured as recommended by ATCC. Cell lines were authenticated by the suppliers and tested negative for Mycoplasma.

[0888] For stable Tol2 transposon library integration, cells were transfected using Lipofectamine 3000 (Thermo Fisher) following standard protocols with equimolar amounts of Tol2 transposase plasmid (a gift from K. Kawakami) and transposon-containing plasmid. For library applications, 15-cm plates with >10⁷ initial cells were used, and for single sgRNA targeting, 48-well plates with >10⁵ initial cells were used. To generate library cell lines with stable Tol2-mediated genomic integration, cells were selected with hygromycin starting the day after transfection at an empirically defined concentration and continued for >2 weeks. In cases where sequential plasmid integration was performed such as integrating library and then base editor, cells were transfected with Tol2 transposase plasmid using Lipofectamine 3000 and selected with blasticidin starting the day after transfection for 4 days before harvesting.

### Deep Sequencing

[0889] Genomic DNA was collected from cells 5 days after transfection, after 4 days of antibiotic selection. For library samples, 16 μg gDNA was used for each sample; for individual locus samples and untreated cell library samples, 2 μg gDNA was used; for plasmid library verification, 0.5 μg purified plasmid DNA was used. For individual locus samples, the locus surrounding CRISPR-Cas9 mutation was PCR-amplified in two steps using primers >50-bp from the Cas9 target site. PCR1 was performed to amplify the endogenous locus or library cassette using the primers specified below. PCR2 was performed to add full-length Illumina sequencing adapters using the NEBNext Index Primer Sets 1 and 2 (New England Biolabs) or internally ordered primers with equivalent sequences. All PCRs were performed using NEBNext Ultra II Q5 Master Mix. Extension time for all PCR reactions was extended to 2 minutes per cycle to prevent skewing towards GC-rich sequences. Samples were pooled using Tape Station (Agilent) and quantified using a KAPA Library Quantification Kit (KAPA Biosystems). The pooled samples were sequenced using NextSeq or MiSeq (Illumina).

### Library Names

[0890] Supplementary figures, tables, and deposited data use different names for designed libraries than the manuscript for convenience. The “comprehensive context library” is referred to as “12kChar” and contains 12,000 target sites designed with all 4-mers surrounding a substrate nucleotide at protospacer positions 1-11 and all 6-mers surrounding an adenine or cytosine at position 6. Three disease-associated libraries called “CBE precision editing SNV library”, “ABE precision editing SNV library”, and “transversion-enriched SNV library” in the manuscript are referred to as “CtoT”, “AtoG”, and “CtoGA”, indicating the base editing event that corrects the disease-related variants included in each library.

### Sequence Motif Models

[0891] For prediction tasks where the target variable is continuous and has range in (0, 1), a logistic transformation to the data was applied, and then linear regression was used. For continuous data representing fractions, values equal to 0 or 1 were discarded. For classification tasks, the target variables were either 0 or 1 indicating absence or presence of activity, and logistic regression was used. Target variables included the efficiency of C⋅G-to-T⋅A editing by CBEs, A⋅T-to-G⋅C editing by ABEs, the presence or absence of cytosine editing by ABEs and of guanine editing by CBEs, and the purity of cytosine transversions by CBEs. Each of these statistics involves calculating a denominator corresponding to the total number of reads at a target sequence, or the total number of edited reads at a target sequence. Target sequences with fewer than 100 reads in the denominator were discarded to ensure the accuracy of estimated statistics in the training and testing data. Features were obtained by one-hot-encoding nucleotides per position relative to a substrate nucleotide or to the protospacer. The data were randomly split into training and test sets at an 80:20 ratio. Sequence motifs described by these regression models consider each position independently and are intended primarily for visualization.

### Base Editing Efficiency Model

[0892] Base editing efficiency varies by experimental batch. To combine replicates across batches, first a mean centering and logit transformation was performed at up to 10,638 gRNA-target pairs in each experimental condition separately from the 12kChar library which includes all 4-mers surrounding A or C from protospacer positions 1 to 11. Data was discarded at target sites with fewer than 100 total reads, then averaged values at matched target sites across experimental replicates. Values of negative or positive infinity (resulting from logit of 0 or 1) were discarded. The data were randomly split into training and test sets at a ratio of 90:10. Each target site had a single output value corresponding to the mean logit fraction of sequenced reads with any base editing activity. Data points comprising a single replicate were assigned weight=0.5. Data points comprising multiple replicates were assigned a weight of the median logit variance divided by the logit variance at that data point, or 1, whichever value was smaller. In this manner, exactly half of the data points comprising multiple replicates were assigned a weight of 1, and those with higher variance were assigned a lower weight. Features from each target sequence were obtained using protospacer positions −9 to 21. Features included one-hot encoded single nucleotide identities at each position, one-hot encoded dinucleotides at neighboring positions, the melting temperature of the sequence and various subsequences, the total number of each nucleotide in the sequence, and the total number of G or C nucleotides in the sequence. Gradient-boosted regression trees from the python package scikit-learn were used, and trained with tuples of (x, y, weights) using the training data. Hyperparameter optimization was performed by varying the number of estimators between {100, 250, 500}, the minimum samples per leaf in {2, 5}, and the maximum tree depth in {2, 3, 4, 5}. A 5-fold cross-validation was performed by splitting the training set into a training and validation set at a ratio of 8:1 and retained the combination of hyperparameters with the strongest average cross-validation performance as the final model. Models were trained in this manner for each combination of cell-type and base editor. Models were evaluated on the test set which was not used during hyperparameter optimization.

### Bystander Editing Model

[0893] A dataset was assembled where each gRNA-target pair was matched with a table of observed base editing genotypes and their frequencies among reads with edited outcomes. Data points with fewer than 100 edited reads were discarded. Edited genotypes occurring at higher than 2.5% frequency with no edits at any substrate nucleotides (defined as C for CBEs and A for ABEs) in positions 1-10 were also discarded. Data from multiple experimental replicates were combined by summing read counts for each observed genotype.

[0894] Briefly, a deep conditional autoregressive model was designed and implemented that used an input target sequence surrounding a protospacer and PAM to output a frequency distribution on combinations of base editing outcomes in the python package pytorch. The model predicts substitutions at cytosines and guanines for CBEs and adenines and cytosines for ABEs from protospacer positions −10 to 20. The model transforms each substrate nucleotide and its local context using a shared encoder into a deep representation, then applies an autoregressive decoder that iteratively generates a distribution over base editing outcomes at each substrate nucleotide while conditioning on all previous generated outcomes. The encoder and decoder are coupled with a learned position-wise bias towards producing an unedited outcome. The model is trained on observed data by minimizing the KL divergence. Importantly, the conditional autoregressive design is sufficiently expressive to learn any possible joint distribution in the output space, thereby representing a powerful and general method for learning the editing tendencies of any base editor from data.

[0895] Input features were obtained by one-hot encoding each substrate nucleotide and the 5 nucleotides (where 5 is a hyperparameter) on either side of it and concatenating this with a one-hot encoding of the position of the substrate nucleotide within positions −9 to 20. Additional features considered but found to detract from model performance during hyperparameter optimization included concatenating a one-hot encoding of the full sequence context. Hyperparameter optimization on the radii of nucleotides surrounding the substrate nucleotide considered values in {3, 5, 7, 9}, and found 5 to be optimal when averaged across hyperparameter optimization rounds that included simultaneous changes in other hyperparameters. Each substrate nucleotide within the editing range were featurized in this manner for each target sequence.

[0896] The model uses two neural networks: an encoder with two hidden layers of 64 neurons and a decoder with five hidden layers of 64 neurons. The networks are fully connected, use ReLU activations, and contain residual connections between neighboring pairs of layers that have equal shape. A dropout frequency of 5.0% was used and tuned by hyperparameter optimization. An architecture search in hyperparameter optimization was included and found that these shapes were a local optimum in the surrounding neighborhood varying the number of neurons per layer and the number of layers in each network.

[0897] During a forward pass of the model at a single target site, the shapes of relevant variables are:
[0898] x.shape=(n.edit.b, x_dim)
[0899] y_mask.shape=(n.uniq.e+1, n.edit.b, y_mask_dim)
[0900] target.shape=(n.uniq.e+1, n.edit.b, 4, 1)
[0901] obs_freq.shape=(n.uniq.e)
   where:
[0902] ‘x’ is the featurized input
[0903] ‘y_mask’ is used to provide previously observed outcomes to the decoder while masking future outcomes, in a conditional autoregressive manner
[0904] ‘target’ is a one-hot encoding of each unique edited genotype
[0905] ‘obs_freq’ contains the observed frequencies for each edited genotype
[0906] n.uniq.e=the number of unique observed edited genotypes for a target site
[0907] n.edit.b=the number of editable bases in the target sequence
[0908] x_dim=the number of features for a single substrate nucleotide in a single target sequence

[0909] The shape n.uniq.e+1 is used to indicate the inclusion of a row for the wild-type outcome. The model was run on this outcome and the result was used to adjust all predicted probabilities to obtain a denominator equal to 1−p(wild-type).

[0910] The tensor ‘y_mask’ was used to provide previously observed outcomes to the decoder while masking future outcomes in a conditional autoregressive fashion. Previously observed unedited nucleotides are encoded as [1/3, 1/3, 1/3], while editable nucleotides are encoded as [0, 0, 0] if unedited, and otherwise are a one-hot encoding of the nucleotide resulting from the base edit. Future nucleotides are encoded as [−1, −1, −1].

[0911] The following shape transformations occur during a forward pass.
[0912] 1. Model encodes x: (n.edit.b, x_dim)→(n.edit.b, x_enc_dim)
[0913] 2. Expanding and concatenating with y_mask→(n.uniq.e+1, n.edit.b, x_enc_dim+y_mask_dim).
[0914] 3. Decode→(n.uniq.e+1, n.edit.b, 1, 4)
[0915] 4. Add unedited bias, then log softmax→(n.uniq.e+1, n.edit.b, 1, 4)
[0916] 5. Matrix multiplication with target one-hot-encoding→(n.uniq.e+1, n.edit.b, 1, 1), reshape→(n.uniq.e+1, n.edit.b)
[0917] 6. Sum log likelihoods→(n.uniq.e+1)
[0918] 7. Adjust all likelihoods by (1−wild-type) denominator→(n.uniq.e). The wild-type outcome is encoded at the last position.

[0919] The resulting (n.uniq.e) shape vector contains a number corresponding to the predicted frequency of each unique observed genotype (totaling n.uniq.e). To obtain a loss during training, the KL divergence between the predicted frequency distribution and the observed frequency distribution is used.

[0920] A learnable bias toward unedited outcomes is a part of the model. This component uses an input shape of (n.uniq.e+1, n.edit.b, 1, 4) and outputs a tensor with equivalent shape: (n.uniq.e+1, n.edit.b, 1, 4). Its parameters correspond to a single value for each position and substrate nucleotide representing a bias towards producing an unedited outcome. One important aspect of the structure of the data is that most dimensions of the input and output tensors vary by target site. Batches comprised of groups of target sites. Empirically, it was observed that this property caused minimal speed gains when training the model on CPUs vs GPUs.

### Quantification and Statistical Analysis

### Sequence Alignment and Data Processing

[0921] Sequencing reads were assigned to designed library target sites by locality sensitive hashing). Target contexts that were intentionally designed to be highly similar to each other were designed barcodes to assist accurate assignment. Sequence alignment was performed using Smith-Waterman with the parameters: match +1, mismatch −1, indel start −5, indel extend 0. Nucleotides with PHRED score below 30 were assumed to be the reference nucleotide.

For base editing analysis, aligned reads with no indels were retained for analysis and events were defined as the combination of all possible substitutions at all substrate nucleotides in the target site in a read, where a single sequencing read corresponds to an observation of a single event. Substrate nucleotides were defined as C and G for CBEs and A and C for ABEs.
For indel analysis, reads containing indels with at least one indel position occurring between protospacer positions −6 to 26 were retained, where position 1 is the 5′-most nucleotide of the protospacer, and 0 is used to refer to the position between −1 and 1. Reads containing indels without at least six nucleotides with at least 90% match frequency on both sides of each indel were discarded. Events were defined as indels identified by position, length, and inserted nucleotides occurring in a read. Combination indels were either not observed at all or only at exceedingly low frequencies in endogenous data and were therefore excluded from consideration when analyzing library data.

### Quantifying Base Editing Profiles

[0922] The frequencies of each single-nucleotide mutation were tabulated at each position in each designed target sequence from the sequence alignments. Then, the following steps were applied to adjust treatment data by control data, adjust batch effects and identify base editing mutations that occur at frequencies above background.

[0923] The first step was to filter control mutations in control data occurring at or above a 5.0% frequency threshold. As control conditions do not undergo a second selection step (90-95% cell death then expansion), control mutations that are relatively common are highly likely to expand in frequency in treatment data. Since the resulting treatment population frequency (before editing) has high variance (due to the 90-95% cell death then expansion), it is very difficult to de-confound this factor from mutations occurring due to base editing.

[0924] The second step was to filter treatment mutations that could be explained by control mutations. The probability of treatment mutations occurring from a binomial distribution parameterized by the observed mutation frequency in the control population and filter mutations was determined at FDR=0.05.

[0925] The third step was to filter mutations occurring in both control and treatment conditions, subtract control frequencies from treatment frequencies.

[0926] The fourth step was to filter treatment mutations that could be explained by Illumina sequencing errors. The probability of treatment mutations was determined under a binomial distribution parameterized by the lowest quality (>Q30) sequencing call at that position and filter at FDR=0.05. The empirical determined lowest quality is often Q32 or Q36, which correspond to error thresholds of 6e-4 and 2e-4 respectively.

[0927] The fifth step was to filter treatment mutations that could be explained by batch effects (comparing treatment vs. treatment). Summary statistics of the mean mutation rate were calculated across all target site with a given substrate nucleotide at a particular position to another nucleotide, yielding an L×12 matrix for each condition, where L=55, 56, or 61. Then, perform one-way ANOVA was performed using the batches defined on the first slide and filter mutations at Bonferroni-corrected p-value threshold of 0.005.

[0928] The sixth step was to identify treatment mutations that were consistent by editors across conditions, especially rare ones, while filtering background mutations (comparing treatment vs. treatment). On the batch-effect-corrected L×12 matrix per condition, group by editors, calculate normalized rankings of each mutation within each condition. Perform robust rank aggregation on each mutation to obtain an upper bound on the p-value.

[0929] Based on the above analysis, editing profiles were empirically designed for denoising and filtering base editing outcomes. To ensure high sensitivity, these profiles were designed to be broad to minimize the possibility of excluding reads with legitimate base editing activity. For CBEs, base editing activity was defined as C to A, G, or T at positions −9 to 20 and G to A or C at positions −9 to 5. For ABEs, base editing activity was defined as A to G at positions −5 to 20, A to C or T at positions 1 to 10, and C to G or T at positions 1 to 10. For all analysis described herein that required tabulating reads with base editing activity, reads were discarded that did not have base editing activity according to these broad profiles.

Selection of Variants from Disease Databases

[0930] Disease variants were selected from the NCBI ClinVar database and the Human Gene Mutation Database (HGMD) for computational screening and subsequent experimental correction using versions of both database that were up to date as of September of 2018. Variants from ClinVar that were designated by at least one lab as ‘pathogenic’ or ‘likely pathogenic’ were retained. Variants from HGMD with a disease association of ‘DM’ or disease-causing mutation were retained.

[0931] SpCas9 gRNAs were enumerated for each disease allele. Using a previous version of BE-Hive, predicted correction precisions were predicted for each gRNA-allele combination and used to prioritize the design of libraries. Two libraries of 12,000 gRNA-target pairs were designed called ‘AtoG’ and ‘CtoT’. The ‘AtoG’ library contained 11,585 unique pathogenic variants while ‘CtoT’ contained 7,444 unique pathogenic variants. A third library ‘CtoGA’ with 3,800 gRNA-target pairs targeting pathogenic variants was designed with 2,668 unique pathogenic variants.

### Quantifying the Ratio of Base Editing to Indel Activity

[0932] Target sites with greater than 1000 reads and with at least one indel read were retained (to avoid division by zero). Notably, no pseudocounts were used. To calculate BE:indel ratios, library target sites without a substrate nucleotide within the typical base editing window were filtered. These target sites resulted from the library design choices that prioritized diversity and exploration, but these target sites are unlikely to be selected for editing in common user applications. The geometric mean was selected as a summary statistic because BE:indel ratios were distributed roughly log-normal, and the statistic summarizes more of the data than the median.

### Adjusting for Noise in 1-bp Indels

[0933] To characterize rare indels from base editing outcomes, endogenous data (with large sequencing depth, in HEK293T cells) was used and designed certain library conditions were designed (with high editing efficiency and deep sequencing coverage) as gold standards to denoise the other library datasets. In both endogenous data and gold-standard library conditions, the fraction of 1-bp indels was observed to be 5-30% of all indels. In contrast, in many treatment library conditions, the fraction was as high as 80-95%, similar to those in untreated library controls. In addition, these background 1-bp indels appeared to occur nearly uniformly across the target site, while in the “gold standard” conditions, 1-bp indels are concentrated near the HNH nick and typical base editing window. Based on these sets of observations, it was reasoned that the conservative adjustment of treatment conditions by control conditions (by subtracting the frequency of indels at matching target sites, with matching indel start position and length) did not completely adjust noise from treatment data. To enable a more accurate calculation of base editing to indel ratios, an additional quality control step was applied where the frequencies of 1-bp indels in library target sites were decreased uniformly such that the global (across the entire library of sequence contexts) frequency of 1-bp indels was at most 30% of all indels.

### Adjusting for Batch Effects in Base Editing to Indel Ratios

[0934] Some batch effects in calculated BE:indel ratios were observed. To adjust for batch effects, two-way ANOVA was applied, crossing experimental batch with base editor, on the geometric mean BE:indel ratio for all library experiments. As instructed by the experimental protocol, the batch must be distinct for each combination of cell-type and library. For this analysis, all point mutants of base editors were dinned with their wild-type versions since small differences in BE:indel ratios were observed that were dominated by differences by experimental batch and by base editor. The average coefficient across all experimental batches was added to the learned coefficient for each base editor to obtain a batch-adjusted coefficient for each base editor. An adjustment factor was obtained as the difference between the average geometric mean BE:indel ratio across experiments for a given base editor and the batch-adjusted coefficient for that base editor. Adjustment factors were used to adjust the BE:indel ratio at individual target sites for analysis requiring such resolution.

### Definition of Disequilibrium Score

[0935] Disequilibrium scores are calculated for a given pair of substrate nucleotides as the ratio between the observed joint editing probability and the probability of both nucleotides being edited together assuming statistical independence. Calculating a valid log disequilibrium score from observed data requires non-zero frequencies for p(first nucleotide is edited), p(second nucleotide is edited), and p(first and second nucleotide are edited). Disequilibrium score values above one indicate a tendency for both or neither to be edited together (positive log disequilibrium score), while values below one indicate a tendency for only one or the other to be edited (negative log disequilibrium score).

### Data and Code Availability

[0936] The sequencing data generated herein are available at the NCBI Sequence Read Archive database under PRJNA591007. Processed data have been deposited under the following DOIs: 10.6084/m9.figshare.10673816 and 10.6084/m9.figshare.10678097. The code used for data processing and analysis are available at github.com/maxwshen/lib-dataprocessing and github.com/maxwshen/lib-analysis.

### Additional Resources

[0937] Interactive web application for BE-Hive can be found at crisprbehive.design. The Python package for BE-Hive can be found at github.com/maxwshen/be_predict_efficiency and github.com/maxwshen/be_predict_bystander.

### REFERENCES FOR EXAMPLE 1

[0938] 1. Adli, M. (2018). The CRISPR tool kit for genome editing and beyond. Nat. Commun. 9, 1911.
[0939] 2. Adolph, M. B., Love, R. P., Feng, Y., and Chelico, L. (2017). Enzyme cycling contributes to efficient induction of genome mutagenesis by the cytidine deaminase APOBEC3B. Nucleic Acids Res. 45, 11925-11940.
[0940] 3. Anzalone, A. V., Randolph, P. B., Davis, J. R., Sousa, A. A., Koblan, L. W., Levy, J. M., Chen, P. J., Wilson, C., Newby, G. A., Raguram, A., et al. (2019). Search-and-replace genome editing without double-strand breaks or donor DNA. Nature.
[0941] 4. Arbab, M., Srinivasan, S., Hashimoto, T., Geijsen, N., and Sherwood, R. I. (2015). Cloning-free CRISPR. Stem Cell Rep. 5, 1-10.
[0942] 5. Bailey, M. H., Tokheim, C., Porta-Pardo, E., Sengupta, S., Bertrand, D., Weerasinghe, A., Colaprico, A., Wendl, M. C., Kim, J., Reardon, B., et al. (2018). Comprehensive Characterization of Cancer Driver Genes and Mutations. Cell 173, 371-385.e18.
[0943] 6. Barkal, A. A., Srinivasan, S., Hashimoto, T., Gifford, D. K., and Sherwood, R. I. (2016). Cas9 Functionally Opens Chromatin.
[0944] 7. Basu, U., Chaudhuri, J., Alpert, C., Dutt, S., Ranganath, S., Li, G., Schrum, J. P., Manis, J. P., and Alt, F. W. (2005). The AID antibody diversification enzyme is regulated by protein kinase a phosphorylation. Nature 438, 508-511.
[0945] 8. Beale, R. C. L., Petersen-Mahrt, S. K., Watt, I. N., Harris, R. S., Rada, C., and Neuberger, M. S. (2004). Comparison of the Differential Context-dependence of DNA Deamination by APOBEC Enzymes: Correlation with Mutation Spectra in Vivo. J. Mol. Biol. 337, 585-596.
[0946] 9. Blom, N., Sicheritz-Pontén, T., Gupta, R., Gammeltoft, S., and Brunak, S. (2004). Prediction of post-translational glycosylation and phosphorylation of proteins from the amino acid sequence. PROTEOMICS 4, 1633-1649.
[0947] 10. Brown, A.-L., Li, M., Goncearenco, A., and Panchenko, A. R. (2019). Finding driver mutations in cancer: Elucidating the role of background mutational processes. PLOS Comput. Biol. 15, e1006981.
[0948] 11. Chadwick, A. C., Wang, X., and Musunuru, K. (2017). In Vivo Base Editing of PCSK9 (Proprotein Convertase Subtilisin/Kexin Type 9) as a Therapeutic Alternative to Genome Editing. Arter. Thromb Vasc Biol 37, 1741-1747.
[0949] 12. Chaudhuri, A., and Behan, P. O. (2004). Fatigue in neurological disorders. The Lancet 363, 978-988.
[0950] 13. Chen, B., Gilbert, L. A., Cimini, B. A., Schnitzbauer, J., Zhang, W., Li, G.-W., Park, J., Blackburn, E. H., Weissman, J. S., Qi, L. S., et al. (2013). Dynamic Imaging of Genomic Loci in Living Human Cells by an Optimized CRISPR/Cas System. Cell 155, 1479-1491.
[0951] 14. Cong, L., Ran, F. A., Cox, D., Lin, S., Barretto, R., Habib, N., Hsu, P. D., Wu, X., Jiang, W., Marraffini, L. A., et al. (2013). Multiplex Genome Engineering Using CRISPR/Cas Systems. Science 339, 819.
[0952] 15. Doench, J. G., Fusi, N., Sullender, M., Hegde, M., Vaimberg, E. W., Donovan, K. F., Smith, I., Tothova, Z., Wilen, C., Orchard, R., et al. (2016). Optimized sgRNA design to maximize activity and minimize off-target effects of CRISPR-Cas9. Nat. Biotechnol. 34, 184-191.
[0953] 16. Doshi, B. S., and Arruda, V. R. (2018). Gene therapy for hemophilia: what does the future hold? Ther. Adv. Hematol. 9, 273-293.
[0954] 17. Doudna, J., and Knott, G. (2018). CRISPR-Cas guides the future of genetic engineering. Science 361, 1-4.
[0955] 18. Friedman, J. H. (2001). GreedyFunctionApproximation.GradientBoostingMachine.Friedman (1999). Ann. Stat. 29, 1189-1232.
[0956] 19. Gaudelli, N. M., Komor, A. C., Rees, H. A., Packer, M. S., Badran, A. H., Bryson, D. I., and Liu, D. R. (2017). Programmable base editing of A⋅T to G⋅C in genomic DNA without DNA cleavage. Nature 551, 464-471.
[0957] 20. Gehrke, J. M., Cervantes, O., Clement, M. K., Wu, Y., Zeng, J., Bauer, D. E., Pinello, L., and Joung, J. K. (2018). An APOBeC3A-Cas9 base editor with minimized bystander and off-target activities. Nat. Biotechnol. 36, 977.
[0958] 21. Hart, T., Chandrashekhar, M., Aregger, M., Steinhart, Z., Brown, K. R., MacLeod, G., Mis, M., Zimmermann, M., Fradet-Turcotte, A., Sun, S., et al. (2015). High-Resolution CRISPR Screens Reveal Fitness Genes and Genotype-Specific Cancer Liabilities. Cell 163, 1515-1526.
[0959] 22. Huang, T. P., Zhao, K. T., Miller, S. M., Gaudelli, N. M., Oakes, B. L., Fellmann, C., Savage, D. F., and Liu, D. R. (2019). Circularly permuted and PAM-modified Cas9 variants broaden the targeting scope of base editors. Nat. Biotechnol.
[0960] 23. Imai, K., Slupphaug, G., Lee, W.-I., Revy, P., Nonoyama, S., Catalan, N., Yel, L., Forveille, M., Kavli, B., Krokan, H. E., et al. (2003). Human uracil-DNA glycosylase deficiency associated with profoundly impaired immunoglobulin class-switch recombination. Nat. Immunol. 4, 1023-1028.
[0961] 24. Jinek, M., East, A., Cheng, A., Lin, S., Ma, E., and Doudna, J. (2013). RNA-programmed genome editing in human cells. ELife 2, e00471.
[0962] 25. Kalia, S. S., Adelman, K., Bale, S. J., Chung, W. K., Eng, C., Evans, J. P., Herman, G. E., Hufnagel, S. B., Klein, T. E., Korf, B. R., et al. (2016). Recommendations for reporting of secondary findings in clinical exome and genome sequencing, 2016 update (ACMG SF v2.0): a policy statement of the American College of Medical Genetics and Genomics. Genet. Med. 19, 249.
[0963] 26. Kim, H. S., Jeong, Y. K., Hur, J. K., Kim, J.-S., and Bae, S. (2019). Adenine base editors catalyze cytosine conversions in human cells. Nat. Biotechnol.
[0964] 27. Koblan, L. W., Doman, J. L., Wilson, C., Levy, J. M., Tay, T., Newby, G. A., Maianti, J. P., Raguram, A., and Liu, D. R. (2018). Improving cytidine and adenine base editors by expression optimization and ancestral reconstruction. Nat. Biotechnol. 36, 843-848.
[0965] 28. Koike-Yusa, H., Li, Y., Tan, E.-P., Velasco-Herrera, M. D. C., and Yusa, K. (2013). Genome-wide recessive genetic screening in mammalian cells with a lentiviral CRISPR-guide RNA library. Nat. Biotechnol. 32, 267-273.
[0966] 29. Komor, A. C., Kim, Y. B., Packer, M. S., Zuris, J. A., and Liu, D. R. (2016). Programmable editing of a target base in genomic DNA without double-stranded DNA cleavage. Nature 533, 420-424.
[0967] 30. Komor, A. C., Zhao, K. T., Packer, M. S., Gaudelli, N. M., Waterbury, A. L., Koblan, L. W., Kim, Y. B., Badran, A. H., and Liu, D. R. (2017). Improved base excision repair inhibition and bacteriophage Mu Gam protein yields C:G-to-T:A base editors with higher efficiency and product purity. Sci. Adv. 3, eaao4774.
[0968] 31. Kuscu, C., Parlak, M., Tufan, T., Yang, J., Szlachta, K., Wei, X., Mammadov, R., and Adli, M. (2017). CRISPR-STOP: gene silencing through base-editing-induced nonsense mutations. Nat. Methods 14, 710-712.
[0969] 32. Kweon, J., Jang, A.-H., Shin, H. R., See, J.-E., Lee, W., Lee, J. W., Chang, S., Kim, K., and Kim, Y. (2019). A CRISPR-based base-editing screen for the functional assessment of BRCA1 variants. Oncogene.
[0970] 33. Landrum, M. J., Lee, J. M., Benson, M., Brown, G., Chao, C., Chitipiralla, S., Gu, B., Hart, J., Hoffman, D., Hoover, J., et al. (2016). ClinVar: public archive of interpretations of clinically relevant variants. Nucleic Acids Res 44, D862-8.
[0971] 34. Liang, P., Ding, C., Sun, H., Xie, X., Xu, Y., Zhang, X., Sun, Y., Xiong, Y., Ma, W., Liu, Y., et al. (2017). Correction of 0-thalassemia mutant by base editor in human embryos. Protein Cell 8, 811-822.
[0972] 35. Lin, S., Staahl, B. T., Alla, R. K., and Doudna, J. A. (2014). Enhanced homology-directed human genome engineering by controlled timing of CRISPR/Cas9 delivery. ELife 3, e04766-e04766.
[0973] 36. Liu, L. D., Huang, M., Dai, P., Liu, T., Fan, S., Cheng, X., Zhao, Y., Yeap, L. S., and Meng, F. L. (2018). Intrinsic Nucleotide Preference of Diversifying Base Editors Guides Antibody Ex Vivo Affinity Maturation. Cell Rep. 25, 884-892.e3.
[0974] 37. Love, R. P., Xu, H., and Chelico, L. (2012). Biochemical analysis of hypermutation by the deoxycytidine deaminase APOBEC3A. J. Biol. Chem. 287, 30812-30822.
[0975] 38. Ma, H., Wu, Y., Dang, Y., Choi, J.-G., Zhang, J., and Wu, H. (2014). Pol III Promoters to Express Small RNAs: Delineation of Transcription Initiation. Mol. Ther. Nucleic Acids 3, e161.
[0976] 39. Mali, P., Yang, L., Esvelt, K. M., Aach, J., Guell, M., DiCarlo, J. E., Norville, J. E., and Church, G. M. (2013). RNA-Guided Human Genome Engineering via Cas9. Science 339, 823.
[0977] 40. McBride, K. M., Gazumyan, A., Woo, E. M., Schwickert, T. A., Chait, B. T., and Nussenzweig, M. C. (2008). Regulation of class switch recombination and somatic mutation by AID phosphorylation. J. Exp. Med. 205, 2585-2594.
[0978] 41. Min, Y.-L., Bassel-Duby, R., and Olson, E. N. (2019). CRISPR Correction of Duchenne Muscular Dystrophy. Annu. Rev. Med. 70, 239-255.
[0979] 42. Molla, K. A., and Yang, Y. (2019). CRISPR/Cas-Mediated Base Editing: Technical Considerations and Practical Applications. Trends Biotechnol. 37, 1121-1142.
[0980] 43. Nishida, K., Arazoe, T., Yachie, N., Banno, S., Kakimoto, M., Tabata, M., Mochizuki, M., Miyabe, A., Araki, M., Hara, K. Y., et al. (2016). Targeted nucleotide editing using hybrid prokaryotic and vertebrate adaptive immune systems. Science 353, aaf8729.
[0981] 44. Nishimasu, H., Shi, X., Ishiguro, S., Gao, L., Hirano, S., Okazaki, S., Noda, T., Abudayyeh, O. O., Gootenberg, J. S., Mori, H., et al. (2018). Engineered CRISPR-Cas9 nuclease with expanded targeting space. Science 361, 1259.
[0982] 45. Van Den Oord, A., Kalchbrenner, N., and Kavukcuoglu, K. (2016). Pixel recurrent neural networks. In 33rd International Conference on Machine Learning, ICML 2016, pp. 2611-2620.
[0983] 46. Paquet, D., Kwart, D., Chen, A., Sproul, A., Jacob, S., Teo, S., Olsen, K. M., Gregg, A., Noggle, S., and Tessier-Lavigne, M. (2016). Efficient introduction of specific homozygous and heterozygous mutations using CRISPR/Cas9. Nature 533, 1-18.
[0984] 47. Pardinas, A. F., Holmans, P., Pocklington, A. J., Escott-Price, V., Ripke, S., Carrera, N., Legge, S. E., Bishop, S., Cameron, D., Hamshere, M. L., et al. (2018). Common schizophrenia alleles are enriched in mutation-intolerant genes and in regions under strong background selection. Nat. Genet. 50, 381-389.
[0985] 48. Pérez-Durán, P., Belver, L., de Yébenes, V. G., Delgado, P., Pisano, D. G., and Ramiro, A. R. (2012). UNG shapes the specificity of AID-induced somatic hypermutation. J. Exp. Med. 209, 1379-1389.
[0986] 49. Pérez-Palma, E., Gramm, M., Nürnberg, P., May, P., and Lal, D. (2019). Simple ClinVar: an interactive web server to explore and retrieve gene and disease variants aggregated in ClinVar database. Nucleic Acids Res. 47, W99-W105.
[0987] 50. Pham, P., Bransteitter, R., Petruska, J., and Goodman, M. F. (2003). Processive AID-catalysed cytosine deamination on single-stranded DNA simulates somatic hypermutation. Nature 424, 103-107.
[0988] 51. Pham, P., Smolka, M. B., Calabrese, P., Landolph, A., Zhang, K., Zhou, H., and Goodman, M. F. (2008). Impact of phosphorylation and phosphorylation-null mutants on the activity and deamination specificity of activation-induced cytidine deaminase. J. Biol. Chem. 283, 17428-17439.
[0989] 52. Rajagopal, N., Srinivasan, S., Kooshesh, K., Guo, Y., Edwards, M. D., Banerjee, B., Syed, T., Emons, B. J. M., Gifford, D. K., and Sherwood, R. I. (2016). High-throughput mapping of regulatory DNA. Nat. Biotechnol. 34, 167-174.
[0990] 53. Rees, H. A., and Liu, D. R. (2018). Base editing: precision chemistry on the genome and transcriptome of living cells. Nat. Rev. Genet. 19, 770-788.
[0991] 54. Ryu, S.-M., Koo, T., Kim, K., Lim, K., Baek, G., Kim, S.-T., Kim, H. S., Kim, D., Lee, H., Chung, E., et al. (2018). Adenine base editing in mouse embryos and an adult mouse model of Duchenne muscular dystrophy. Nat. Biotechnol. 36, 536.
[0992] 55. Shalem, O., Sanjana, N. E., Hartenian, E., Shi, X., Scott, D. A., Mikkelsen, T. S., Heckl, D., Ebert, B. L., Root, D. E., Doench, J. G., et al. (2014). Genome-Scale CRISPR-Cas9 Knockout Screening in Human Cells. Science 343, 84.
[0993] 56. Shen, M. W., Arbab, M., Hsu, J. Y., Worstell, D., Culbertson, S. J., Krabbe, O., Cassa, A., Liu, D. R., Gifford, D. K., and Sherwood, R. I. (2018). Predictable and precise template-free CRISPR editing of pathogenic variants. Nature 563, 646-651.
[0994] 57. Sherwood, R. I., Hashimoto, T., O'Donnell, C. W., Lewis, S., Barkal, A. A., Van Hoff, J. P., Karun, V., Jaakkola, T., and Gifford, D. K. (2014). Discovery of directional and nondirectional pioneer transcription factors by modeling DNase profile magnitude and shape. Nat. Biotechnol. 32, 171-178.
[0995] 58. Song, C. Q., Jiang, T., Richter, M., Rhym, L. H., Koblan, L. W., Zafra, M. P., Schatoff, E. M., Doman, J. L., Cao, Y., Dow, L. E., et al. (2019). Adenine base editing in an adult mouse model of tyrosinaemia. Nat. Biomed. Eng.
[0996] 59. Stahl, E. A., Breen, G., Forstner, A. J., McQuillin, A., Ripke, S., Trubetskoy, V., Mattheisen, M., Wang, Y., Coleman, J. R. I., Gaspar, H. A., et al. (2019). Genome-wide association study identifies 30 loci associated with bipolar disorder. Nat. Genet. 51, 793-803.
[0997] 60. Stenson, P. D., Mort, M., Ball, E. V, Shaw, K., Phillips, A. D., and Cooper, D. N. (2014). The Human Gene Mutation Database: Building a comprehensive mutation repository for clinical and molecular genetics, diagnostic testing and personalized genomic medicine. Hum. Genet. 133, 1-9.
[0998] 61. Tan, J., Zhang, F., Karcher, D., and Bock, R. (2019). Engineering of high-precision base editors for site-specific single nucleotide replacement. Nat. Commun. 10.
[0999] 62. Thuronyi, B. W., Koblan, L. W., Levy, J. M., Yeh, W.-H., Zheng, C., Newby, G. A., Wilson, C., Bhaumik, M., Shubina-Oleinik, O., Holt, J. R., et al. (2019). Continuous evolution of base editors with expanded target compatibility and improved activity. Nat. Biotechnol.
[1000] 63. Urasaki, A., Morvan, G., and Kawakami, K. (2006). Functional dissection of the Tol2 transposable element identified the minimal cis-sequence and a highly repetitive sequence in the subterminal region essential for transposition. Genetics 174, 639-649.
[1001] 64. Villiger, L., Grisch-Chan, H. M., Lindsay, H., Ringnalda, F., Pogliano, C. B., Allegri, G., Fingerhut, R., Haberle, J., Matos, J., Robinson, M. D., et al. (2018). Treatment of a metabolic liver disease by in vivo genome base editing in adult mice. Nat Med 24, 1519-1525.
[1002] 65. Wang, T., Wei, J. J., Sabatini, D. M., and Lander, E. S. (2014). Genetic Screens in Human Cells Using the CRISPR-Cas9 System. Science 343, 80.
[1003] 66. Yamane, A., Resch, W., Kuo, N., Kuchen, S., Li, Z., Sun, H. W., Robbiani, D. F., McBride, K., Nussenzweig, M. C., and Casellas, R. (2011). Deep-sequencing identification of the genomic targets of the cytidine deaminase AID and its cofactor RPA in B lymphocytes. Nat. Immunol. 12, 62-69.
[1004] 67. Yeh, W. H., Chiang, H., Rees, H. A., Edge, A. S. B., and Liu, D. R. (2018). In vivo base editing of post-mitotic sensory cells. Nat. Commun. 9.
[1005] 68. Zeng, Y., Li, J., Li, G., Huang, S., Yu, W., Zhang, Y., Chen, D., Chen, J., Liu, J., and Huang, X. (2018). Correction of the Marfan Syndrome Pathogenic FBN1 Mutation by Base Editing in Human Cells and Heterozygous Embryos. Mol. Ther. 26, 2631-2637.

### Example 2. Use of ABE8 at the SMN Exon 7 Locus to Edit the C:G→T:A SNV that is Causal to Spinal Muscular Atrophy (SMA)

[1006] This Example tested a series of ABE8-based editor to repair the C:G→T:A SNV mutation in position 6 of exon 7 that is causal to spinal muscular atrophy (SMA). Eleven different editors were tested, including ABE8 fusions to SpCas9, SaKKH, Cas9-NG, CP1028, CP1041, CP1041-NG, VRQR, Cpf1, SpyMac, and the evolved NRRH and NRCH editors developed by our lab in combination with a series of sgRNAs that placed the target nucleotide at positions ranging 5 through 12 in exon 7.

[1007] Fusion Constructs Tested:

| BASE EDITOR FUSION | AMINO ACID SEQUENCE |
|---|---|
| ABE8-NRTH editor | (SEQ ID NO: 463) |
| ABE8-SpyMac editor | (SEQ ID NO: 464) |
| ABE8-VRQR-CP1041 editor | (SEQ ID NO: 465) |
| ABE8-SaCas9 editor | (SEQ ID NO: 466) |
| ABE8-NRCH editor | (SEQ ID NO: 467) |
| ABE8-NRRH editor | (SEQ ID NO: 468) |
| ABE8-SaKKH editor | (SEQ ID NO: 469) |
| ABE8-Cas9-NG editor | (SEQ ID NO: 470) |
| ABE8-CP1041 editor | (SEQ ID NO: 471) |
| ABE8-CP1028 editor | (SEQ ID NO: 472) |
| ABE8-CPF1 editor | (SEQ ID NO: 473) |
| ABE8-VRQR editor | (SEQ ID NO: 474) |
| ABE8-Cas9-NG-CP1041 editor | (SEQ ID NO: 475) |
| ABE8-iSpyMac editor | (SEQ ID NO: 476) |

[1008] sgRNAs Tested for Each Construct:

| sgRNA | | SNV | |
|---|---|---|---|
| name | PAM | position | sequence |
| 3 | NGA | 9 | TTTTGTCTAAAACCctgtaa |
| | | | SEQ ID NO: 368) |
| 37 | NGG | 10 | ATTTTGTCTAAAACCctgta |
| | | | (SEQ ID NO: 364) |
| 139 | NNNRRT | 8 | TTTGTCTAAAACCctgtaag |
| | | | (SEQ ID NO: 366) |
| 52 | NAA | 8 | TTTGTCTAAAACCctgtaag |
| | | | (SEQ ID NO: 366) |
| 177 | NAT | 5 | GTCTAAAACCCTGTAAGGAA |
| | | | (SEQ ID NO: 408) |
| 178 | NAA | 6 | TGTCTAAAACCCTGTAAGGA |
| | | | (SEQ ID NO: 409) |
| 179 | NAA | 7 | TTGTCTAAAACCCTGTAAGG |
| | | | (SEQ ID NO: 410) |
| 54 | TTTV | 10 | ATTTTGTCTAAAACCCTGTAAGG |
| | | | (SEQ ID NO: 411) |
| 55 | TTTV | 11 | GATTTTGTCTAAAACCCTGTAAG |
| | | | (SEQ ID NO: 412) |
| 56 | TTTV | 12 | TGATTTTGTCTAAAACCCTGTAA |
| | | | (SEQ ID NO: 413) |

[1009] FIG. 4 shows the results of adenine base editing of the SMN2 disease causing SNV in SMA mESCs. Editors are denoted below the x-axis with PAM sequence in parentheses, and protospacer position of the target nucleotide assuming a 20nt protospacer where the PAM is at position 21-23. The results show that the iSpyMac and the CP constructs edited the SNV mutation with high efficiency.

[1010] Proof of repair of the exon 7 splicing error is shown in FIG. 5, which shows a gel electrophoresis image of SMN cDNA PCR amplification spanning exon 6 to exon 8, depicting bands that include or that have skipped exon 7 in pre-mRNA splicing in SMA mESCs treated with the indicated ABE8-fusion base editors.

### EQUIVALENTS AND SCOPE

[1011] In the claims articles such as “a,” “an,” and “the” may mean one or more than one unless indicated to the contrary or otherwise evident from the context. Claims or descriptions that include “or” between one or more members of a group are considered satisfied if one, more than one, or all of the group members are present in, employed in, or otherwise relevant to a given product or process unless indicated to the contrary or otherwise evident from the context. The invention includes embodiments in which exactly one member of the group is present in, employed in, or otherwise relevant to a given product or process. The invention includes embodiments in which more than one, or all of the group members are present in, employed in, or otherwise relevant to a given product or process.

[1012] Furthermore, the invention encompasses all variations, combinations, and permutations in which one or more limitations, elements, clauses, and descriptive terms from one or more of the listed claims are introduced into another claim. For example, any claim that is dependent on another claim can be modified to include one or more limitations found in any other claim that is dependent on the same base claim. Where elements are presented as lists, e.g., in Markush group format, each subgroup of the elements is also disclosed, and any element(s) can be removed from the group. It should it be understood that, in general, where the invention, or aspects of the invention, is/are referred to as comprising particular elements and/or features, certain embodiments of the invention or aspects of the invention consist, or consist essentially of, such elements and/or features. For purposes of simplicity, those embodiments have not been specifically set forth in haec verba herein. It is also noted that the terms “comprising” and “containing” are intended to be open and permits the inclusion of additional elements or steps. Where ranges are given, endpoints are included. Furthermore, unless otherwise indicated or otherwise evident from the context and understanding of one of ordinary skill in the art, values that are expressed as ranges can assume any specific value or sub-range within the stated ranges in different embodiments of the invention, to the tenth of the unit of the lower limit of the range, unless the context clearly dictates otherwise.

[1013] This application refers to various issued patents, published patent applications, journal articles, and other publications, all of which are incorporated herein by reference. If there is a conflict between any of the incorporated references and the instant specification, the specification shall control. In addition, any particular embodiment of the present invention that falls within the prior art may be explicitly excluded from any one or more of the claims. Because such embodiments are deemed to be known to one of ordinary skill in the art, they may be excluded even if the exclusion is not set forth explicitly herein. Any particular embodiment of the invention can be excluded from any claim, for any reason, whether or not related to the existence of prior art.

What is claimed is:

1. A method of using at least one machine learning model to identify at least one guide RNA for use in a base editing system for introducing a desired change in a nucleotide sequence, the base editing system comprising a napDNAbp and a deaminase, the method comprising:
using software executing on at least one computer hardware processor to perform:
obtaining input data indicative of the nucleotide sequence and a set of one or more guide RNAs;
generating first input features from the input data;
applying a first machine learning model to the first input features to obtain first output data indicative, for each guide RNA in the set of guide RNAs, of a base editing efficiency, at one or multiple locations in the nucleotide sequence, of the base editing system when using the each guide RNA,
generating second input features from the input data;
applying a second machine learning model to the second input features to obtain second output data indicative, for each guide RNA in the set of guide RNAs, of bystander editing activity, at one or multiple locations in the nucleotide sequence, by the base editing system when using the each guide RNA; and
identifying, using the first output data and the second output data, the at least one guide RNA for use in the base editing system for introducing the desired change in the nucleotide sequence.

2. The method of claim 1, wherein the set of guide RNAs includes a first guide RNA, and wherein, the input data includes first data indicative of at least a part of a nucleotide sequence associated with the first guide RNA.

3. The method of claim 2, wherein the first data specifies a spacer or a protospacer sequence associated with the first guide RNA.

4. The method of claim 1 or any other preceding claim, wherein obtaining the input data indicative of the nucleotide sequence and the set of guide RNAs, comprises:
obtaining, by the software and from at least one source external to the software, the input data indicative of the nucleotide sequence and the set of guide RNAs.

5. The method of claim 1 or any other preceding claim, wherein obtaining the data indicative of the nucleotide sequence and the set of guide RNAs, comprises:
obtaining, by the software and from at least one source external to the software, first data indicative of the nucleotide sequence; and
generating, from the first data indicative of the nucleotide sequence, data indicative of the set of guide RNAs.

6. The method of claim 1 or any other preceding claim, wherein the first machine learning model comprises a non-linear machine learning model selected from the group consisting of a random forest model, a logistic regression model, a support vector machine model, a generalized linear model, a hierarchical Bayesian model, and neural network model.

7. The method of claim 1 or any other preceding claim, wherein the first machine learning model comprises a random forest model.

8. The method of claim 1 or any other preceding claim, wherein the set of guide RNAs includes a first guide RNA, and wherein generating the first input features comprises generating multiple features to include in the first input features, the multiple features including:
features encoding at least some nucleotides in a protospacer sequence or spacer sequence associated with the first guide RNA; and
features encoding at least some nucleotides, in the nucleotide sequence, located within a threshold number of nucleotides of the protospacer sequence associated with the first guide RNA.

9. The method of claim 8, wherein generating the features encoding the at least some nucleotides in the protospacer sequence comprises generating a one-hot encoding of the at least some nucleotides in the protospacer sequence.

10. The method of claim 8, wherein the multiple features further include one or more of the following features:
features encoding at least some dinucleotides at neighboring positions in the protospacer sequence;
features representing melting temperature of the first guide RNA;
one or more features representing a total number of G, C, A, and/or T nucleotides in the protospacer sequence;
one or more features representing a percentage of G, C, A, and/or T nucleotides in the protospacer sequence; and
a feature representing an average base editing efficiency of the base editing system.

11. The method of claim 1 or any other preceding claim, wherein the set of guide RNAs includes a first guide RNA, wherein the first output data is indicative of a fraction of sequence reads containing at least one base edit at any nucleotide in a desired window about a protospacer sequence associated with the first guide RNA, among all sequence reads.

12. The method of claim 1 or any other preceding claim, wherein the second first machine learning model comprises a non-linear machine learning model selected from the group consisting of a random forest model, a logistic regression model, a support vector machine model, a generalized linear model, a hierarchical Bayesian model, and neural network model.

13. The method of claim 12 or any other preceding claim, wherein the second machine learning model comprises a deep neural network model.

14. The method of claim 13, wherein the neural network model comprises a conditional autoregressive neural network model.

15. The method of claim 14, wherein the conditional autoregressive neural network model includes:
an encoder neural network mapping input data to a latent representation; and
a decoder neural network mapping the latent representation to output data,
wherein the decoder neural network has an autoregressive structure.

16. The method of claim 15, wherein the encoder neural network comprises a multi-layer fully connected network with residual connections.

17. The method of claim 15, wherein the decoder neural network generates a distribution over base editing outcomes at each nucleotide while conditioning on previously-generated outcomes.

18. The method of claim 13, wherein the neural network model includes parameters representing a position-wise bias toward producing an unedited outcome.

19. The method of claim 1 or any other preceding claim, wherein the set of guide RNAs includes a first guide RNA, and wherein generating the second input features comprises generating multiple features to include in the second input features, the multiple features including:
features encoding at least some nucleotides in a protospacer sequence or spacer sequence associated with the first guide RNA; and
features encoding at least some nucleotides, in the nucleotide sequence, located within a threshold number of nucleotides of the protospacer sequence associated with the first guide RNA.

20. The method of claim 1 or any other preceding claim, wherein the second output data is indicative of frequencies of occurrence of base editing outcomes, each of which includes edits to nucleotides at multiple positions.

21. The method of claim 1 or any other preceding claim, wherein the second output data is indicative of a frequency distribution on combinations of base editing outcomes.

22. The method of claim 1 or any other preceding claim, wherein the set of guide RNAs includes a first guide RNA, wherein, for a specific combination of base edits, the second output data is indicative of a frequency of occurrence of the specific combination of base edits among all sequenced reads containing at least one base edit at any nucleotide in a desired window about a protospacer sequence associated with the first guide RNA.

23. The method of claim 1, wherein the set of guide RNAs includes a first guide RNA, wherein the first output data includes a first base editing efficiency value for the first guide RNA, wherein the second output data includes a first bystander editing value for the first guide RNA, and wherein identifying the guide RNA using the first output data and the second output data, comprises multiplying the first base editing efficiency value by the first bystander editing value.

24. The method of claim 1 or any other preceding claim, wherein the first machine learning model comprises a first plurality of values for a respective first plurality of parameters, the first plurality of values used by the at least one computer hardware processor to obtain the first output data from the first input features.

25. The method of claim 24 or any other preceding claim, wherein the first plurality of parameters comprises at least one thousand parameters.

26. The method of claim 25, wherein the first plurality of parameters comprises between one thousand and ten thousand parameters.

27. The method of claim 24 or any other preceding claim, wherein the first machine learning model comprises a random forest model comprising at least 100 decision trees, each of the at least 100 decision trees having at least a depth of D, and wherein processing the input data using the random forest model comprises performing 100*D comparisons.

28. The method of claim 27, wherein the random forest model comprises at least 500 decision trees.

29. The method of claim 27, wherein D is greater than or equal to five, wherein processing the input data using the random forest model comprises performing at least 2500 comparisons.

30. The method of claim 1 or any other preceding claim, wherein the second machine learning model comprises a second plurality of values for a respective second plurality of parameters, the second plurality of values used by the at least one computer hardware processor to obtain the second output data from the second input features.

31. The method of claim 30, wherein the second plurality of parameters comprises at least ten thousand parameters.

32. The method of claim 30, wherein the second plurality of parameters comprises between 25,000 and 100,000 parameters.

33. The method of claim 30, wherein the second plurality of parameters comprises between 30,000 and 40,000 parameters.

34. The method of claim 1 or any other preceding claim further comprising:
synthesizing the identified guide RNA for use in the base editing system for introducing the desired change in the nucleotide sequence.

35. The method of claim 1 or any other preceding claim further comprising:
using the identified guide RNA and the base editing system to introduce the desired change in a cell.

36. The method of claim 1 or any other preceding claim further comprising:
determining a likelihood of whether the identified guide RNA and the base editing system, when used in combination, will result in introducing the desired change in a cell.

37. A method for training the first machine learning model of any of claims 1-36, comprising: (i) preparing a library comprising a plurality of nucleic acid molecules each encoding a nucleotide desired sequence and a cognate guide RNA; (ii) introducing the library into a plurality of host cells; (iii) contacting the library in the host cells with a Cas-based genome editing system to produce a plurality of genomic repair products; (iv) determining the sequences of the genomic repair products; and (v) training the first machine learning model with training data that comprises at least the sequences of the genomic repair products and the cognate guide RNA.

38. A method for training the second machine learning model of any of claims 1-36, comprising: (i) preparing a library comprising a plurality of nucleic acid molecules each encoding a nucleotide desired sequence and a cognate guide RNA; (ii) introducing the library into a plurality of host cells; (iii) contacting the library in the host cells with a Cas-based genome editing system to produce a plurality of genomic repair products; (iv) determining the sequences of the genomic repair products; and (v) training the second machine learning model with training data that comprises at least the sequences of the genomic repair products and the cognate guide RNA.

39. At least one computer readable storage medium storing processor executable instructions that, when executed by at least one computer hardware processor, cause the at least one computer hardware processor to perform a method of using at least one machine learning model to identify at least one guide RNA for use in a base editing system for introducing a desired change in a nucleotide sequence, the base editing system comprising a napDNAbp and a deaminase, the method comprising:
obtaining input data indicative of the nucleotide sequence and a set of one or more guide RNAs;
generating first input features from the input data;
applying a first machine learning model to the first input features to obtain first output data indicative, for each guide RNA in the set of guide RNAs, of a base editing efficiency, at one or multiple locations in the nucleotide sequence, of the base editing system when using the each guide RNA;
generating second input features from the input data;
applying a second machine learning model to the second input features to obtain second output data indicative, for each guide RNA in the set of guide RNAs, of bystander editing activity, at one or multiple locations in the nucleotide sequence, by the base editing system when using the each guide RNA; and
identifying, using the first output data and the second output data, the at least one guide RNA for use in the base editing system for introducing the desired change in the nucleotide sequence.

40. A system comprising:
at least one computer hardware processor; and
at least one computer readable storage medium storing processor executable instructions that, when executed by the at least one computer hardware processor, cause the at least one computer hardware processor to perform a method of using at least one machine learning model to identify at least one guide RNA for use in a base editing system for introducing a desired change in a nucleotide sequence, the base editing system comprising a napDNAbp and a deaminase, the method comprising:
obtaining input data indicative of the nucleotide sequence and a set of one or more guide RNAs;
generating first input features from the input data;
applying a first machine learning model to the first input features to obtain first output data indicative, for each guide RNA in the set of guide RNAs, of a base editing efficiency, at one or multiple locations in the nucleotide sequence, of the base editing system when using the each guide RNA;
generating second input features from the input data;
applying a second machine learning model to the second input features to obtain second output data indicative, for each guide RNA in the set of guide RNAs, of bystander editing activity, at one or multiple locations in the nucleotide sequence, by the base editing system when using the each guide RNA; and
identifying, using the first output data and the second output data, the at least one guide RNA for use in the base editing system for introducing the desired change in the nucleotide sequence.

41. A method of identifying at least one guide RNA for use in a base editing system for introducing a desired change in a nucleotide sequence, the base editing system comprising a napDNAbp and a deaminase, the method comprising:
using software executing on at least one computer hardware processor to perform:
obtaining input data indicative of the nucleotide sequence and a set of one or more guide RNAs;
generating first input features from the input data;
applying a first machine learning model to the first input features to obtain first output data indicative, for each guide RNA in the set of guide RNAs, of a base editing efficiency, at one or multiple locations in the nucleotide sequence, of the base editing system when using the each guide RNA; and
identifying, using the first output data, the at least one guide RNA for use in the base editing system for introducing the desired change in the nucleotide sequence.

42. The method of claim 41, further comprising:
generating second input features from the input data;
applying a second machine learning model to the second input features to obtain second output data indicative, for each guide RNA in the set of guide RNAs, of bystander editing activity, at one or multiple locations in the nucleotide sequence, by the base editing system when using the each guide RNA,
wherein identifying the guide RNA is performed using the first output data and the second output data.

43. At least one computer readable storage medium storing processor executable instructions that, when executed by at least one computer hardware processor, cause the at least one computer hardware processor to perform a method of identifying at least one guide RNA for use in a base editing system for introducing a desired change in a nucleotide sequence, the base editing system comprising a napDNAbp and a deaminase, the method comprising:
obtaining input data indicative of the nucleotide sequence and a set of one or more guide RNAs;
generating first input features from the input data;
applying a first machine learning model to the first input features to obtain first output data indicative, for each guide RNA in the set of guide RNAs, of a base editing efficiency, at one or multiple locations in the nucleotide sequence, of the base editing system when using the each guide RNA; and
identifying, using the first output data, the at least one guide RNA for use in the base editing system for introducing the desired change in the nucleotide sequence.

44. A system, comprising:
at least one computer hardware processor; and
at least one computer readable storage medium storing processor executable instructions that, when executed by the at least one computer hardware processor, cause the at least one computer hardware processor to perform a method of identifying at least one guide RNA for use in a base editing system for introducing a desired change in a nucleotide sequence, the base editing system comprising a napDNAbp and a deaminase, the method comprising:
obtaining input data indicative of the nucleotide sequence and a set of one or more guide RNAs;
generating first input features from the input data;
applying a first machine learning model to the first input features to obtain first output data indicative, for each guide RNA in the set of guide RNAs, of a base editing efficiency, at one or multiple locations in the nucleotide sequence, of the base editing system when using the each guide RNA; and
identifying, using the first output data, the at least one guide RNA for use in the base editing system for introducing the desired change in the nucleotide sequence.

45. A method of identifying at least one guide RNA for use in a base editing system for introducing a desired change in a nucleotide sequence, the base editing system comprising a napDNAbp and a deaminase, the method comprising:
using software executing on at least one computer hardware processor to perform:
obtaining input data indicative of the nucleotide sequence and a set of one or more guide RNAs;
generating first input features from the input data;
applying a first machine learning model to the first input features to obtain first output data indicative, for each guide RNA in the set of guide RNAs, of bystander editing activity, at one or multiple locations in the nucleotide sequence, by the base editing system when using the each guide RNA; and
identifying, using the first output data, the at least one guide RNA for use in the base editing system for introducing the desired change in the nucleotide sequence.

46. The method of claim 45, further comprising:
generating second input features from the input data;
applying a second machine learning model to the second input features to obtain second output data indicative, for each guide RNA in the set of guide RNAs, of a base editing efficiency, at one or multiple locations in the nucleotide sequence, of the base editing system when using the each guide RNA,
wherein identifying the guide RNA is performed using the first output data and the second output data.

47. At least one computer readable storage medium storing processor executable instructions that, when executed by at least one computer hardware processor, cause the at least one computer hardware processor to perform a method of identifying at least one guide RNA for use in a base editing system for introducing a desired change in a nucleotide sequence, the base editing system comprising a napDNAbp and a deaminase, the method comprising:
obtaining input data indicative of the nucleotide sequence and a set of one or more guide RNAs;
generating first input features from the input data;
applying a first machine learning model to the first input features to obtain first output data indicative, for each guide RNA in the set of guide RNAs, of bystander editing activity, at one or multiple locations in the nucleotide sequence, by the base editing system when using the each guide RNA; and
identifying, using the first output data, the at least one guide RNA for use in the base editing system for introducing the desired change in the nucleotide sequence.

48. A system, comprising:
at least one computer hardware processor; and
at least one computer readable storage medium storing processor executable instructions that, when executed by at least one computer hardware processor, cause the at least one computer hardware processor to perform a method of identifying at least one guide RNA for use in a base editing system for introducing a desired change in a nucleotide sequence, the base editing system comprising a napDNAbp and a deaminase, the method comprising:
obtaining input data indicative of the nucleotide sequence and a set of one or more guide RNAs;
generating first input features from the input data;
applying a first machine learning model to the first input features to obtain first output data indicative, for each guide RNA in the set of guide RNAs, of bystander editing activity, at one or multiple locations in the nucleotide sequence, by the base editing system when using the each guide RNA; and
identifying, using the first output data, the at least one guide RNA for use in the base editing system for introducing the desired change in the nucleotide sequence.

49. A method, comprising:
using software executing on at least one computer hardware processor to perform:
receiving input data indicative of a selection of:
a nucleotide sequence;
a base editing system comprising a napDNAbp and a deaminase; and
a first guide RNA;
applying a first machine learning model to the first input features, generated from the input data, to obtain first output data indicative of a base editing efficiency, at a desired location in the nucleotide sequence, of the base editing system when using the first guide RNA;
applying a second machine learning model to the second input features, generated from the input data, to obtain second output data indicative of bystander editing activity, at one or multiple locations in the nucleotide sequence, by the base editing system when using the first guide RNA; and
determining, using the first output data and the second output data, a likelihood of whether the first guide RNA and the base editing system, when used in combination, will result in introduce a desired change to the nucleotide sequence in a cell.

50. At least one computer-readable storage medium storing processor-executable instructions that, when executed by at least one computer hardware processor, cause the at least one computer processor to perform:
receiving input data indicative of a selection of:
a nucleotide sequence;
a base editing system comprising a napDNAbp and a deaminase; and
a first guide RNA;
applying a first machine learning model to the first input features, generated from the input data, to obtain first output data indicative of a base editing efficiency, at a desired location in the nucleotide sequence, of the base editing system when using the first guide RNA;
applying a second machine learning model to the second input features, generated from the input data, to obtain second output data indicative of bystander editing activity, at one or multiple locations in the nucleotide sequence, by the base editing system when using the first guide RNA; and
determining, using the first output data and the second output data, a likelihood of whether the first guide RNA and the base editing system, when used in combination, will result in introduce a desired change to the nucleotide sequence in a cell.

51. A system, comprising:
at least one computer hardware processor; and
at least one computer-readable storage medium storing processor-executable instructions that, when executed by the at least one computer hardware processor, cause the at least one computer processor to perform:
receiving input data indicative of a selection of:
a nucleotide sequence;
a base editing system comprising a napDNAbp and a deaminase; and
a first guide RNA;
applying a first machine learning model to the first input features, generated from the input data, to obtain first output data indicative of a base editing efficiency, at a desired location in the nucleotide sequence, of the base editing system when using the first guide RNA;
applying a second machine learning model to the second input features, generated from the input data, to obtain second output data indicative of bystander editing activity, at one or multiple locations in the nucleotide sequence, by the base editing system when using the first guide RNA; and
determining, using the first output data and the second output data, a likelihood of whether the first guide RNA and the base editing system, when used in combination, will result in introduce a desired change to the nucleotide sequence in a cell.

52. A guide RNA for use in a base editing system for introducing a target change into a target DNA sequence identified by the method of any of claims 1-51.

53. A guide RNA comprising a protospacer selected from the group consisting of SEQ ID Nos: 451-3199.

54. The guide RNA of any of claims 52-53, wherein at least one base editor demonstrated at least 50% correction precision to the wild-type genotype among edited reads.

55. The guide RNA of any of claims 52-54, wherein the least one base editor is ABE (SEQ ID NO: 3210), ABE-CP1041 (SEQ ID NO: 3211), AID-BE4 (SEQ ID NO: 3202), BE4 (SEQ ID NO: 3200), BE4-CP1028 (SEQ ID NO: 3208), CDA-BE4 (SEQ ID NO: 3203), eA3A-BE4 (SEQ ID NO: 3205), eA3A_T31AT44A, or evoAPOBEC1-BE4max (SEQ ID NO: 3204).

56. The guide RNA of any of claims 52-55, wherein the base editing system comprises an ABE of SEQ ID NO: 3210 and said guide RNA comprises a protospacer identified as any of the sequences of Index Nos. 880-2498 of Table 5.

57. The guide RNA of any of claims 52-56, wherein the base editing system comprises an ABE-CP1041 of SEQ ID NO: 3211, and said guide RNA comprises a protospacer identified as any of the sequences of Index Nos. 880-990, 998-1014, 1042-1313, 1749-2184, 2186-2695 of Table 5.

58. The guide RNA of any of claims 52-57, wherein the base editing system comprises an AID-BE4 of SEQ ID NO: 3202, and said guide RNA comprises a protospacer identified as any of the sequences of Index Nos. 1-301 of Table 5.

59. The guide RNA of any of claims 52-58, wherein the base editing system comprises an BE4 of SEQ ID NO: 3200, and said guide RNA comprises a protospacer identified as any of the sequences of Index Nos. 2-3, 6-12, 16-17, 19-27, 40-42, 44, 47-48, 52-53, 55-58, 62-65, 68, 70, 74-78, 80, 82-92, 94-98, 198, 200-204, 207, 210-211, 213-219, 222-224, 226-229, 231-233, 235-236, 238, 244, 247-248, 252-255, 257-258, 260, 263-270, 272-275, 279, 281-287, 289-290, 293-294, 296, 298-299, 301, 541, 543-626, 628-712, 722-723, 798-838, 840-848, 858-878 of Table 5.

60. The guide RNA of any of claims 52-59, wherein the base editing system comprises an BE4-CP1028 of SEQ ID NO: 3208, and said guide RNA comprises a protospacer identified as any of the sequences of Index Nos. 2-3, 5-9, 11-15, 17-27, 40, 42, 44, 47-50, 52-54, 56-58, 63, 65, 74-75, 77, 79-83, 85, 87-93, 96-98, 157, 162, 182, 263, 302, 305, 308, 313, 315, 324, 336, 338, 341, 343, 345, 403, 407-411, 413, 415-416, 418-419, 421, 423-427, 429-440, 461-464, 467-468, 470-471, 473, 508-514, 516-520, 522-524, 526-535, 537, 539-540, 544, 586, 588-590, 592-605, 607, 621, 624, 632, 702-703, 705-708, 710-712, 723, 799-801, 803-804, 807-808, 810, 813-816, 818-828, 830-835, 837-838, 840-848, 858-860, 864-873, 876-878 of Table 5.

61. The guide RNA of any of claims 52-60, wherein the base editing system comprises an CDA-BE4 of SEQ ID NO: 3203, and said guide RNA comprises a protospacer identified as any of the sequences of Index Nos. 4, 6-7, 9-13, 15-17, 20-24, 26, 31-32, 35, 40-41, 44, 47-50, 52-53, 55, 63-65, 68, 70-72, 75-81, 84-87, 89-94, 98, 100-101, 103-104, 107, 109, 111, 113, 118-121, 124-127, 130-132, 136, 141-144, 146-148, 151-160, 162, 164, 166-167, 170, 172-173, 175-180, 184, 195, 198, 200-204, 206-215, 218-219, 221-224, 226-227, 230, 233-234, 237, 239, 243-244, 247, 251-257, 261-267, 274, 281-284, 286-287, 289-290, 292, 295, 297-302, 304, 411-412, 414, 417, 420, 422-423, 425, 428, 431, 433, 435, 438, 442-445, 457, 463, 472, 477-479, 485, 488, 491, 493-494, 507, 510, 513, 515, 518, 521, 536, 538, 540, 542, 552, 561, 563-569, 573-582, 587-588, 591, 593-595, 598, 622-623, 625, 627, 640, 667, 704, 712-721, 724-727, 734-752, 755, 759, 761-768, 773-774, 776, 780, 785-786, 788-789, 795-797, 800, 802, 805-806, 811-812, 814, 817-818, 820, 829, 831, 833, 835, 839-842, 849, 852, 854, 856, 861, 864, 874-875, 878-879 of Table 5.

62. The guide RNA of any of claims 52-61, wherein the base editing system comprises an eA3A-BE4 of SEQ ID NO: 3204, and said guide RNA comprises a protospacer identified as any of the sequences of Index Nos. 2-3, 6, 8-10, 13, 15-17, 20, 22-23, 25, 27-28, 32, 35, 42, 45-47, 53, 55-56, 63-64, 74, 76, 80-81, 86-92, 96-98, 111, 119, 121, 127, 151, 154, 156, 159-160, 171, 178, 180, 184, 192, 198, 204-206, 210-211, 214, 216-217, 220, 224, 228-229, 231-233, 235, 244, 247, 252-253, 260, 263-268, 270, 272-274, 276, 279, 281-285, 287-289, 293-294, 296, 298, 303-304, 306-312, 314, 316-317, 319-323, 326-329, 331-337, 339, 343-345, 347-348, 352-362, 364-372, 374-406, 410-411, 432-434, 438, 446-447, 449-453, 456, 458, 460, 466, 468-469, 474-476, 481, 486, 489-490, 492, 495-506, 521, 523, 525, 539, 543-551, 553-556, 558-564, 569, 573, 575, 578-579, 581, 583-584, 588, 590, 593, 595-596, 598-600, 602, 604, 607, 614-620, 622, 624, 626, 628-630, 632-639, 641-647, 651, 657, 660, 662-663, 665-666, 668-671, 673-674, 678, 686-689, 691-693, 695-700, 702-703, 707-709, 711-712, 715, 723, 741, 800-806, 808, 811, 813-821, 823-827, 829-830, 832-833, 835, 844, 846-849, 852, 858-860, 865-866, 868-870, 872-874, 878, 2696-2737 of Table 5.

63. The guide RNA of any of claims 52-62, wherein the base editing system comprises an eA3A_T31AT44A of SEQ ID NO: 3206, and said guide RNA comprises a protospacer identified as any of the sequences of Index Nos. 2725-2726 and 2738-2749 of Table 5.

64. The guide RNA of any of claims 52-63, wherein the base editing system comprises an evoAPOBEC1-BE4max of SEQ ID NO: 3204, and said guide RNA comprises a protospacer identified as any of the sequences of Index Nos. 1-4, 6-7, 9-11, 13, 15-18, 20, 22-27, 32, 35, 40-42, 44, 47-49, 51-53, 55-56, 58, 61-63, 68, 70-72, 74, 76-82, 84-92, 94-98, 100, 104, 108, 111, 116, 121, 125-126, 131, 136, 141-143, 146-148, 150-151, 153, 155-160, 162, 170, 172, 175, 178-180, 183-184, 190, 195, 198, 200-201, 203-204, 206, 210-212, 214, 217, 220-221, 223-227, 229, 231-233, 235-239, 244, 247, 249, 252-258, 263-270, 272-274, 276, 278-279, 281-284, 286-290, 293-294, 296, 298, 300-301, 304, 318, 321, 324-325, 330-333, 338, 340, 342, 346, 349-351, 358, 363, 373, 379-380, 385-389, 411, 423, 425, 427, 431, 433, 438, 441, 445, 448, 454-455, 459, 463, 465, 472, 476, 480, 482-484, 487, 491, 493-494, 503, 510, 514, 517, 521, 535, 540, 542, 544-545, 551-555, 558-564, 567-568, 573-576, 579-582, 588-589, 593, 595-596, 598, 600, 603, 605, 610, 612-617, 620, 622, 625-626, 628, 630-631, 635-641, 644, 651, 653-654, 656, 676, 678-679, 682, 688, 694, 704, 711, 713-715, 717, 720-723, 728-734, 742-743, 745, 747, 750, 752-754, 756-758, 760, 762, 766, 769-773, 775, 777-779, 781-784, 787, 790-794, 798, 800, 803, 805-806, 809, 811-812, 814, 818-819, 824-825, 827, 829, 831, 833, 835, 838-839, 841-842, 847, 850-855, 857-859, 861, 864, 870-873, 875, 878-879 of Table 5.

65. A complex comprising a base editor and a guide RNA selected from the method of claim 1 or a guide RNA of any one of claims 52-64.

66. The complex of claim 65, wherein the base editor comprises a napDNAbp.

67. The complex of claim 66, wherein the napDNAbp is a Cas9 or variant thereof.

68. The complex of claim 66, wherein the napDNAbp is a wildtype SpCas9 comprising an amino acid sequence of SEQ ID NO: 5, or an amino acid sequence having at least 80%, 85%, 90%, 95%, or 99% sequence identity with SEQ ID NO: 5.

69. The complex of claim 66, wherein the napDNAbp is a wildtype SpCas9 comprising an amino acid sequence of SEQ ID NOs: 5, 8, 10, 12, and 407 or an amino acid sequence having at least 80%, 85%, 90%, 95%, or 99% sequence identity with any one of SEQ ID NOs: 5, 8, 10, 12, or 407.

70. The complex of claim 66, wherein the napDNAbp is a SpCas9 ortholog or homolog comprising an amino acid sequence of SEQ ID Nos: 13-26, 44-63, or 74-77, or an amino acid sequence having at least 80%, 85%, 90%, 95%, or 99% sequence identity with any one of SEQ ID NOs: 13-26, 44-63, or 74-77.

71. The complex of claim 66, wherein the napDNAbp is a dead Cas9 comprising an amino acid sequence of SEQ ID Nos: 27-28, or an amino acid sequence having at least 80%, 85%, 90%, 95%, or 99% sequence identity with any one of SEQ ID NOs: 27-28.

72. The complex of claim 66, wherein the napDNAbp is a nickase Cas9 comprising an amino acid sequence of SEQ ID Nos: 29-44, or an amino acid sequence having at least 80%, 85%, 90%, 95%, or 99% sequence identity with any one of SEQ ID NOs: 29-44.

73. The complex of claim 66, wherein the napDNAbp is a circular permutant variant of Cas9 comprising an amino acid sequence of SEQ ID Nos: 64-73, or an amino acid sequence having at least 80%, 85%, 90%, 95%, or 99% sequence identity with any one of SEQ ID NOs: 64-73.

74. The complex of claim 65, wherein the base editor comprises an adenine deaminase.

75. The complex of claim 65, wherein the base editor comprises a cytidine deaminase.

76. The complex of claim 74, wherein the adenine deaminase comprises an amino acid sequence of any one of SEQ ID NOs: 78-91, 403, or 462, or an amino acid sequence having at least 80%, 85%, 90%, 95%, or 99% sequence identity with any one of SEQ ID NOs: 78-91, 403, or 462.

77. The complex of claim 75, wherein the cytidine deaminase comprises an amino acid sequence of any one of SEQ ID NOs: 92-134, or an amino acid sequence having at least 80%, 85%, 90%, 95%, or 99% sequence identity with any one of SEQ ID NOs: 92-134.

78. The complex of claim 65, wherein the base editor comprises one or more linkers having an amino acid sequence comprising any one of SEQ ID NOs.: 135-151, or an amino acid sequence having at least 80%, 85%, 90%, 95%, or 99% sequence identity with any one of SEQ ID NOs: 135-151.

79. The complex of claim 65, wherein the base editor comprises one or more NLS having an amino acid sequence comprising any one of SEQ ID NOs.: 152-162, or an amino acid sequence having at least 80%, 85%, 90%, 95%, or 99% sequence identity with any one of SEQ ID NOs: 152-162.

80. The complex of claim 65, wherein the base editor comprises one or more UGI having an amino acid sequence comprising SEQ ID NO.: 163, or an amino acid sequence having at least 80%, 85%, 90%, 95%, or 99% sequence identity with SEQ ID NO:163.

81. The complex of claim 65, wherein the base editor is an adenosine base editor comprising an amino acid sequence of any one of SEQ ID NOs: 174-221 or 463-476, or an amino acid sequence having at least 80%, 85%, 90%, 95%, or 99% sequence identity with any one of SEQ ID NOs: 174-221 or 463-476.

82. The complex of claim 65, wherein the base editor is a cytidine base editor comprising an amino acid sequence of any one of SEQ ID NOs: 223-248, or an amino acid sequence having at least 80%, 85%, 90%, 95%, or 99% sequence identity with any one of SEQ ID NOs: 223-248.

83. The complex of claim 65, wherein the base editor is ABE (SEQ ID NO: 3210), ABE-CP1041 (SEQ ID NO: 3211), AID-BE4 (SEQ ID NO: 3202), BE4 (SEQ ID NO: 3200), BE4-CP1028 (SEQ ID NO: 3208), CDA-BE4 (SEQ ID NO: 3203), eA3A-BE4 (SEQ ID NO: 3205), eA3A_T31AT44A (SEQ ID NO: 3206), or evoAPOBEC1-BE4max (SEQ ID NO: 3204), or an amino acid sequence having at least 80%, 85%, 90%, 95%, or 99% sequence identity with any one of SEQ ID NOs: 3210, 3211, 3202, 3200, 3208, 3203, 3205, 3206, or 3204.

84. The complex of claim 65, wherein the guide RNA comprises a spacer corresponding to any one of the protospacers of SEQ ID Nos: 451-3199.

85. The complex of claim 65, wherein the base editing system comprises an ABE of SEQ ID NO: 3210 and said guide RNA comprises a spacer corresponding to any one of the protospacers identified as a sequence of Index Nos. 880-2498 of Table 5.

86. The complex of claim 65, wherein the base editing system comprises an ABE-CP1041 of SEQ ID NO: 3211, said guide RNA comprises a spacer corresponding to any one of the protospacers identified as a sequence of Index Nos. 880-990, 998-1014, 1042-1313, 1749-2184, 2186-2695 of Table 5.

87. The complex of claim 65, wherein the base editing system comprises an AID-BE4 of SEQ ID NO: 3202, said guide RNA comprises a spacer corresponding to any one of the protospacers identified as a sequence of Index Nos. 1-301 of Table 5.

88. The complex of claim 65, wherein the base editing system comprises an BE4 of SEQ ID NO: 3200, said guide RNA comprises a spacer corresponding to any one of the protospacers identified as a sequence of Index Nos. 2-3, 6-12, 16-17, 19-27, 40-42, 44, 47-48, 52-53, 55-58, 62-65, 68, 70, 74-78, 80, 82-92, 94-98, 198, 200-204, 207, 210-211, 213-219, 222-224, 226-229, 231-233, 235-236, 238, 244, 247-248, 252-255, 257-258, 260, 263-270, 272-275, 279, 281-287, 289-290, 293-294, 296, 298-299, 301, 541, 543-626, 628-712, 722-723, 798-838, 840-848, 858-878 of Table 5.

89. The complex of claim 65, wherein the base editing system comprises an BE4-CP1028 of SEQ ID NO: 3208, said guide RNA comprises a spacer corresponding to any one of the protospacers identified as a sequence of Index Nos. 2-3, 5-9, 11-15, 17-27, 40, 42, 44, 47-50, 52-54, 56-58, 63, 65, 74-75, 77, 79-83, 85, 87-93, 96-98, 157, 162, 182, 263, 302, 305, 308, 313, 315, 324, 336, 338, 341, 343, 345, 403, 407-411, 413, 415-416, 418-419, 421, 423-427, 429-440, 461-464, 467-468, 470-471, 473, 508-514, 516-520, 522-524, 526-535, 537, 539-540, 544, 586, 588-590, 592-605, 607, 621, 624, 632, 702-703, 705-708, 710-712, 723, 799-801, 803-804, 807-808, 810, 813-816, 818-828, 830-835, 837-838, 840-848, 858-860, 864-873, 876-878 of Table 5.

90. The complex of claim 65, wherein the base editing system comprises an CDA-BE4 of SEQ ID NO: 3203, said guide RNA comprises a spacer corresponding to any one of the protospacers identified as a sequence of Index Nos. 4, 6-7, 9-13, 15-17, 20-24, 26, 31-32, 35, 40-41, 44, 47-50, 52-53, 55, 63-65, 68, 70-72, 75-81, 84-87, 89-94, 98, 100-101, 103-104, 107, 109, 111, 113, 118-121, 124-127, 130-132, 136, 141-144, 146-148, 151-160, 162, 164, 166-167, 170, 172-173, 175-180, 184, 195, 198, 200-204, 206-215, 218-219, 221-224, 226-227, 230, 233-234, 237, 239, 243-244, 247, 251-257, 261-267, 274, 281-284, 286-287, 289-290, 292, 295, 297-302, 304, 411-412, 414, 417, 420, 422-423, 425, 428, 431, 433, 435, 438, 442-445, 457, 463, 472, 477-479, 485, 488, 491, 493-494, 507, 510, 513, 515, 518, 521, 536, 538, 540, 542, 552, 561, 563-569, 573-582, 587-588, 591, 593-595, 598, 622-623, 625, 627, 640, 667, 704, 712-721, 724-727, 734-752, 755, 759, 761-768, 773-774, 776, 780, 785-786, 788-789, 795-797, 800, 802, 805-806, 811-812, 814, 817-818, 820, 829, 831, 833, 835, 839-842, 849, 852, 854, 856, 861, 864, 874-875, 878-879 of Table 5.

91. The complex of claim 65, wherein the base editing system comprises an eA3A-BE4 of SEQ ID NO: 3204, said guide RNA comprises a spacer corresponding to any one of the protospacers identified as a sequence of Index Nos. 2-3, 6, 8-10, 13, 15-17, 20, 22-23, 25, 27-28, 32, 35, 42, 45-47, 53, 55-56, 63-64, 74, 76, 80-81, 86-92, 96-98, 111, 119, 121, 127, 151, 154, 156, 159-160, 171, 178, 180, 184, 192, 198, 204-206, 210-211, 214, 216-217, 220, 224, 228-229, 231-233, 235, 244, 247, 252-253, 260, 263-268, 270, 272-274, 276, 279, 281-285, 287-289, 293-294, 296, 298, 303-304, 306-312, 314, 316-317, 319-323, 326-329, 331-337, 339, 343-345, 347-348, 352-362, 364-372, 374-406, 410-411, 432-434, 438, 446-447, 449-453, 456, 458, 460, 466, 468-469, 474-476, 481, 486, 489-490, 492, 495-506, 521, 523, 525, 539, 543-551, 553-556, 558-564, 569, 573, 575, 578-579, 581, 583-584, 588, 590, 593, 595-596, 598-600, 602, 604, 607, 614-620, 622, 624, 626, 628-630, 632-639, 641-647, 651, 657, 660, 662-663, 665-666, 668-671, 673-674, 678, 686-689, 691-693, 695-700, 702-703, 707-709, 711-712, 715, 723, 741, 800-806, 808, 811, 813-821, 823-827, 829-830, 832-833, 835, 844, 846-849, 852, 858-860, 865-866, 868-870, 872-874, 878, 2696-2737 of Table 5.

92. The complex of claim 65, wherein the base editing system comprises an eA3A_T31AT44A of SEQ ID NO: 3206, said guide RNA comprises a spacer corresponding to any one of the protospacers identified as a sequence of Index Nos. 2725-2726 and 2738-2749 of Table 5.

93. The complex of claim 65, wherein the base editing system comprises an evoAPOBEC1-BE4max of SEQ ID NO: 3204, said guide RNA comprises a spacer corresponding to any one of the protospacers identified as a sequence of Index Nos. 1-4, 6-7, 9-11, 13, 15-18, 20, 22-27, 32, 35, 40-42, 44, 47-49, 51-53, 55-56, 58, 61-63, 68, 70-72, 74, 76-82, 84-92, 94-98, 100, 104, 108, 111, 116, 121, 125-126, 131, 136, 141-143, 146-148, 150-151, 153, 155-160, 162, 170, 172, 175, 178-180, 183-184, 190, 195, 198, 200-201, 203-204, 206, 210-212, 214, 217, 220-221, 223-227, 229, 231-233, 235-239, 244, 247, 249, 252-258, 263-270, 272-274, 276, 278-279, 281-284, 286-290, 293-294, 296, 298, 300-301, 304, 318, 321, 324-325, 330-333, 338, 340, 342, 346, 349-351, 358, 363, 373, 379-380, 385-389, 411, 423, 425, 427, 431, 433, 438, 441, 445, 448, 454-455, 459, 463, 465, 472, 476, 480, 482-484, 487, 491, 493-494, 503, 510, 514, 517, 521, 535, 540, 542, 544-545, 551-555, 558-564, 567-568, 573-576, 579-582, 588-589, 593, 595-596, 598, 600, 603, 605, 610, 612-617, 620, 622, 625-626, 628, 630-631, 635-641, 644, 651, 653-654, 656, 676, 678-679, 682, 688, 694, 704, 711, 713-715, 717, 720-723, 728-734, 742-743, 745, 747, 750, 752-754, 756-758, 760, 762, 766, 769-773, 775, 777-779, 781-784, 787, 790-794, 798, 800, 803, 805-806, 809, 811-812, 814, 818-819, 824-825, 827, 829, 831, 833, 835, 838-839, 841-842, 847, 850-855, 857-859, 861, 864, 870-873, 875, 878-879 of Table 5.

94. One or more polynucleotides encoding the complex of any of claims 65-93.

95. A vector comprising the one or more polynucleotides of claim 94 and one or more promoters that drive the expression of the base editor and the guide RNA.

96. A cell comprising the vector of claim 95.

97. A cell comprising a complex of any of claims 65-93.

98. A pharmaceutical composition comprising: (i) a guide RNA selected from the method of claim 1, a complex of any one of claims 65-93, a polynucleotide of claim 94, or a vector of claim 95; and (ii) a pharmaceutically acceptable excipient.

99. A method of editing a target DNA sequence by base editing using a base editor:
selecting a guide RNA for use in the base editing system in accordance with the method of any of claims 1-36; and
contacting the genome of the target DNA sequence with the selected guide RNA and the base editor, thereby editing the target DNA sequence.

100. The method of claim 99, wherein the method is conducted ex vivo, in vivo, or ex vivo.

101. The method of claim 1, wherein the method restores the function of a disease-causing mutation.

102. The method of claim 99, wherein the method of editing introduces a nucleotide change in the target DNA sequence.

103. The method of claim 102, wherein the nucleotide change is a single nucleotide substitution, a deletion, an insertion, or a combination thereof.

104. The method of claim 102, wherein the nucleotide change is a transition mutation.

105. The method of claim 104, wherein the transition mutation is a G to A substitution, a T to C substitution, a C to T substitution, or an A to G substitution.

106. The method of claim 102, wherein the nucleotide change corrects a mutation in a disease-associated gene.

107. The method of claim 106, wherein the disease-associated gene is associated with cardiac disease; high blood pressure; neurological disease; autoimmune disorder, arthritis; diabetes; cancer; or obesity.

108. The method of claim 106, wherein the disease-associated gene is associated with Adenosine Deaminase (ADA) Deficiency; Alpha-1 Antitrypsin Deficiency; Cystic Fibrosis; Duchenne Muscular Dystrophy; Galactosemia; Hemochromatosis; Huntington's Disease; Maple Syrup Urine Disease; Marfan Syndrome; Neurofibromatosis Type 1; Pachyonychia Congenita; Phenylkeotnuria; Severe Combined Immunodeficiency; Sickle Cell Disease; Smith-Lemli-Opitz Syndrome; and Tay-Sachs Disease, or other monogenetic disorder.

109. The library of the training method of claim 37.

110. The library of the training method of claim 38.

111. The method of claim 1, wherein the first machine learning model is trained using training data generated in part using the base editing system.

112. The method of claim 49, further comprising:
prior to performing the applying,
selecting, based on the editing system indicated by the input data, the first machine learning model and the second machine learning model from a plurality of machine learning models.

The application's sequence listing, which the Patent Office published only in electronic form, follows.

SEQUENCE LISTING (3504 sequences)

SEQ ID NO: 1-4 - skipped (4 entries)

SEQ ID NO: 5 - protein, 1368 aa, Streptococcus pyogenes [sequence omitted]

SEQ ID NO: 6 - DNA, 4104 bp, Streptococcus pyogenes
atggataaaaaatatagcattggcctggatattggcaccaacagcgtgggctgggcggtgattaccgatgaatataaagtgccgagcaaaaaatttaaagtgctgggcaacaccgatcgccatagcattaaaaaaaacctgattggcgcgctgctgtttgatagcggcgaaaccgcggaagcgacccgcctgaaacgcaccgcgcgccgccgctatacccgccgcaaaaaccgcatttgctatctgcaggaaatttttagcaacgaaatggcgaaagtggatgatagcttttttcatcgcctggaagaaagctttctggtggaagaagataaaaaacatgaacgccatccgatttttggcaacattgtggatgaagtggcgtatcatgaaaaatatccgaccatttatcatctgcgcaaaaaactggtggatagcaccgataaagcggatctgcgcctgatttatctggcgctggcgcatatgattaaatttcgcggccattttctgattgaaggcgatctgaacccggataacagcgatgtggataaactgtttattcagctggtgcagacctataaccagctgtttgaagaaaacccgattaacgcgagcggcgtggatgcgaaagcgattctgagcgcgcgcctgagcaaaagccgccgcctggaaaacctgattgcgcagctgccgggcgaaaaaaaaaacggcctgtttggcaacctgattgcgctgagcctgggcctgaccccgaactttaaaagcaactttgatctggcggaagatgcgaaactgcagctgagcaaagatacctatgatgatgatctggataacctgctggcgcagattggcgatcagtatgcggatctgtttctggcggcgaaaaacctgagcgatgcgattctgctgagcgatattctgcgcgtgaacaccgaaattaccaaagcgccgctgagcgcgagcatgattaaacgctatgatgaacatcatcaggatctgaccctgctgaaagcgctggtgcgccagcagctgccggaaaaatataaagaaattttttttgatcagagcaaaaacggctatgcgggctatattgatggcggcgcgagccaggaagaattttataaatttattaaaccgattctggaaaaaatggatggcaccgaagaactgctggtgaaactgaaccgcgaagatctgctgcgcaaacagcgcacctttgataacggcagcattccgcatcagattcatctgggcgaactgcatgcgattctgcgccgccaggaagatttttatccgtttctgaaagataaccgcgaaaaaattgaaaaaattctgacctttcgcattccgtattatgtgggcccgctggcgcgcggcaacagccgctttgcgtggatgacccgcaaaagcgaagaaaccattaccccgtggaactttgaagaagtggtggataaaggcgcgagcgcgcagagctttattgaacgcatgaccaactttgataaaaacctgccgaacgaaaaagtgctgccgaaacatagcctgctgtatgaatattttaccgtgtataacgaactgaccaaagtgaaatatgtgaccgaaggcatgcgcaaaccggcgtttctgagcggcgaacagaaaaaagcgattgtggatctgctgtttaaaaccaaccgcaaagtgaccgtgaaacagctgaaagaagattattttaaaaaaattgaatgctttgatagcgtggaaattagcggcgtggaagatcgctttaacgcgagcctgggcacctatcatgatctgctgaaaattattaaagataaagattttctggataacgaagaaaacgaagatattctggaagatattgtgctgaccctgaccctgtttgaagatcgcgaaatgattgaagaacgcctgaaaacctatgcgcatctgtttgatgataaagtgatgaaacagctgaaacgccgccgctataccggctggggccgcctgagccgcaaactgattaacggcattcgcgataaacagagcggcaaaaccattctggattttctgaaaagcgatggctttgcgaaccgcaactttatgcagctgattcatgatgatagcctgacctttaaagaagatattcagaaagcgcaggtgagcggccagggcgatagcctgcatgaacatattgcgaacctggcgggcagcccggcgattaaaaaaggcattctgcagaccgtgaaagtggtggatgaactggtgaaagtgatgggccgccataaaccggaaaacattgtgattgaaatggcgcgcgaaaaccagaccacccagaaaggccagaaaaacagccgcgaacgcatgaaacgcattgaagaaggcattaaagaactgggcagccagattctgaaagaacatccggtggaaaacacccagctgcagaacgaaaaactgtatctgtattatctgcagaacggccgcgatatgtatgtggatcaggaactggatattaaccgcctgagcgattatgatgtggatcatattgtgccgcagagctttctgaaagatgatagcattgataacaaagtgctgacccgcagcgataaaaaccgcggcaaaagcgataacgtgccgagcgaagaagtggtgaaaaaaatgaaaaactattggcgccagctgctgaacgcgaaactgattacccagcgcaaatttgataacctgaccaaagcggaacgcggcggcctgagcgaactggataaagcgggctttattaaacgccagctggtggaaacccgccagattaccaaacatgtggcgcagattctggatagccgcatgaacaccaaatatgatgaaaacgataaactgattcgcgaagtgaaagtgattaccctgaaaagcaaactggtgagcgattttcgcaaagattttcagttttataaagtgcgcgaaattaacaactatcatcatgcgcatgatgcgtatctgaacgcggtggtgggcaccgcgctgattaaaaaatatccgaaactggaaagcgaatttgtgtatggcgattataaagtgtatgatgtgcgcaaaatgattgcgaaaagcgaacaggaaattggcaaagcgaccgcgaaatattttttttatagcaacattatgaacttttttaaaaccgaaattaccctggcgaacggcgaaattcgcaaacgcccgctgattgaaaccaacggcgaaaccggcgaaattgtgtgggataaaggccgcgattttgcgaccgtgcgcaaagtgctgagcatgccgcaggtgaacattgtgaaaaaaaccgaagtgcagaccggcggctttagcaaagaaagcattctgccgaaacgcaacagcgataaactgattgcgcgcaaaaaagattgggatccgaaaaaatatggcggctttgatagcccgaccgtggcgtatagcgtgctggtggtggcgaaagtggaaaaaggcaaaagcaaaaaactgaaaagcgtgaaagaactgctgggcattaccattatggaacgcagcagctttgaaaaaaacccgattgattttctggaagcgaaaggctataaagaagtgaaaaaagatctgattattaaactgccgaaatatagcctgtttgaactggaaaacggccgcaaacgcatgctggcgagcgcgggcgaactgcagaaaggcaacgaactggcgctgccgagcaaatatgtgaactttctgtatctggcgagccattatgaaaaactgaaaggcagcccggaagataacgaacagaaacagctgtttgtggaacagcataaacattatctggatgaaattattgaacagattagcgaatttagcaaacgcgtgattctggcggatgcgaacctggataaagtgctgagcgcgtataacaaacatcgcgataaaccgattcgcgaacaggcggaaaacattattcatctgtttaccctgaccaacctgggcgcgccggcggcgtttaaatattttgataccaccattgatcgcaaacgctataccagcaccaaagaagtgctggatgcgaccctgattcatcagagcattaccggcctgtatgaaacccgcattgatctgagccagctgggcggcgat

SEQ ID NO: 7 - DNA, 4104 bp, Streptococcus pyogenes
atggataagaaatactcaataggcttagatatcggcacaaatagcgtcggatgggcggtgatcactgatgattataaggttccgtctaaaaagttcaaggttctgggaaatacagaccgccacagtatcaaaaaaaatcttataggggctcttttatttggcagtggagagacagcggaagcgactcgtctcaaacggacagctcgtagaaggtatacacgtcggaagaatcgtatttgttatctacaggagattttttcaaatgagatggcgaaagtagatgatagtttctttcatcgacttgaagagtcttttttggtggaagaagacaagaagcatgaacgtcatcctatttttggaaatatagtagatgaagttgcttatcatgagaaatatccaactatctatcatctgcgaaaaaaattggcagattctactgataaagcggatttgcgcttaatctatttggccttagcgcatatgattaagtttcgtggtcattttttgattgagggagatttaaatcctgataatagtgatgtggacaaactatttatccagttggtacaaatctacaatcaattatttgaagaaaaccctattaacgcaagtagagtagatgctaaagcgattctttctgcacgattgagtaaatcaagacgattagaaaatctcattgctcagctccccggtgagaagagaaatggcttgtttgggaatctcattgctttgtcattgggattgacccctaattttaaatcaaattttgatttggcagaagatgctaaattacagctttcaaaagatacttacgatgatgatttagataatttattggcgcaaattggagatcaatatgctgatttgtttttggcagctaagaatttatcagatgctattttactttcagatatcctaagagtaaatagtgaaataactaaggctcccctatcagcttcaatgattaagcgctacgatgaacatcatcaagacttgactcttttaaaagctttagttcgacaacaacttccagaaaagtataaagaaatcttttttgatcaatcaaaaaacggatatgcaggttatattgatgggggagctagccaagaagaattttataaatttatcaaaccaattttagaaaaaatggatggtactgaggaattattggtgaaactaaatcgtgaagatttgctgcgcaagcaacggacctttgacaacggctctattccccatcaaattcacttgggtgagctgcatgctattttgagaagacaagaagacttttatccatttttaaaagacaatcgtgagaagattgaaaaaatcttgacttttcgaattccttattatgttggtccattggcgcgtggcaatagtcgttttgcatggatgactcggaagtctgaagaaacaattaccccatggaattttgaagaagttgtcgataaaggtgcttcagctcaatcatttattgaacgcatgacaaactttgataaaaatcttccaaatgaaaaagtactaccaaaacatagtttgctttatgagtattttacggtttataacgaattgacaaaggtcaaatatgttactgagggaatgcgaaaaccagcatttctttcaggtgaacagaagaaagccattgttgatttactcttcaaaacaaatcgaaaagtaaccgttaagcaattaaaagaagattatttcaaaaaaatagaatgttttgatagtgttgaaatttcaggagttgaagatagatttaatgcttcattaggcgcctaccatgatttgctaaaaattattaaagataaagattttttggataatgaagaaaatgaagatatcttagaggatattgttttaacattgaccttatttgaagatagggggatgattgaggaaagacttaaaacatatgctcacctctttgatgataaggtgatgaaacagcttaaacgtcgccgttatactggttggggacgtttgtctcgaaaattgattaatggtattagggataagcaatctggcaaaacaatattagattttttgaaatcagatggttttgccaatcgcaattttatgcagctgatccatgatgatagtttgacatttaaagaagatattcaaaaagcacaggtgtctggacaaggccatagtttacatgaacagattgctaacttagctggcagtcctgctattaaaaaaggtattttacagactgtaaaaattgttgatgaactggtcaaagtaatggggcataagccagaaaatatcgttattgaaatggcacgtgaaaatcagacaactcaaaagggccagaaaaattcgcgagagcgtatgaaacgaatcgaagaaggtatcaaagaattaggaagtcagattcttaaagagcatcctgttgaaaatactcaattgcaaaatgaaaagctctatctctattatctacaaaatggaagagacatgtatgtggaccaagaattagatattaatcgtttaagtgattatgatgtcgatcacattgttccacaaagtttcattaaagacgattcaatagacaataaggtactaacgcgttctgataaaaatcgtggtaaatcggataacgttccaagtgaagaagtagtcaaaaagatgaaaaactattggagacaacttctaaacgccaagttaatcactcaacgtaagtttgataatttaacgaaagctgaacgtggaggtttgagtgaacttgataaagctggttttatcaaacgccaattggttgaaactcgccaaatcactaagcatgtggcacaaattttggatagtcgcatgaatactaaatacgatgaaaatgataaacttattcgagaggttaaagtgattaccttaaaatctaaattagtttctgacttccgaaaagatttccaattctataaagtacgtgagattaacaattaccatcatgcccatgatgcgtatctaaatgccgtcgttggaactgctttgattaagaaatatccaaaacttgaatcggagtttgtctatggtgattataaagtttatgatgttcgtaaaatgattgctaagtctgagcaagaaataggcaaagcaaccgcaaaatatttcttttactctaatatcatgaacttcttcaaaacagaaattacacttgcaaatggagagattcgcaaacgccctctaatcgaaactaatggggaaactggagaaattgtctgggataaagggcgagattttgccacagtgcgcaaagtattgtccatgccccaagtcaatattgtcaagaaaacagaagtacagacaggcggattctccaaggagtcaattttaccaaaaagaaattcggacaagcttattgctcgtaaaaaagactgggatccaaaaaaatatggtggttttgatagtccaacggtagcttattcagtcctagtggttgctaaggtggaaaaagggaaatcgaagaagttaaaatccgttaaagagttactagggatcacaattatggaaagaagttcctttgaaaaaaatccgattgactttttagaagctaaaggatataaggaagttaaaaaagacttaatcattaaactacctaaatatagtctttttgagttagaaaacggtcgtaaacggatgctggctagtgccggagaattacaaaaaggaaatgagctggctctgccaagcaaatatgtgaattttttatatttagctagtcattatgaaaagttgaagggtagtccagaagataacgaacaaaaacaattgtttgtggagcagcataagcattatttagatgagattattgagcaaatcagtgaattttctaagcgtgttattttagcagatgccaatttagataaagttcttagtgcatataacaaacatagagacaaaccaatacgtgaacaagcagaaaatattattcatttatttacgttgacgaatcttggagctcccgctgcttttaaatattttgatacaacaattgatcgtaaacgatatacgtctacaaaagaagttttagatgccactcttatccatcaatccatcactggtctttatgaaacacgcattgatttgagtcagctaggaggtgactga

SEQ ID NO: 8 - protein, 1367 aa, Streptococcus pyogenes
MDKKYSIGLDIGTNSVGWAVITDDYKVPSKKFKVLGNTDRHSIKKNLIGALLFGSGETAEATRLKRTARRRYTRRKNRICYLQEIFSNEMAKVDDSFFHRLEESFLVEEDKKHERHPIFGNIVDEVAYHEKYPTIYHLRKKLADSTDKADLRLIYLALAHMIKFRGHFLIEGDLNPDNSDVDKLFIQLVQIYNQLFEENPINASRVDAKAILSARLSKSRRLENLIAQLPGEKRNGLFGNLIALSLGLTPNFKSNFDLAEDAKLQLSKDTYDDDLDNLLAQIGDQYADLFLAAKNLSDAILLSDILRVNSEITKAPLSASMIKRYDEHHQDLTLLKALVRQQLPEKYKEIFFDQSKNGYAGYIDGGASQEEFYKFIKPILEKMDGTEELLVKLNREDLLRKQRTFDNGSIPHQIHLGELHAILRRQEDFYPFLKDNREKIEKILTFRIPYYVGPLARGNSRFAWMTRKSEETITPWNFEEVVDKGASAQSFIERMTNFDKNLPNEKVLPKHSLLYEYFTVYNELTKVKYVTEGMRKPAFLSGEQKKAIVDLLFKTNRKVTVKQLKEDYFKKIECFDSVEISGVEDRFNASLGAYHDLLKIIKDKDFLDNEENEDILEDIVLTLTLFEDRGMIEERLKTYAHLFDDKVMKQLKRRRYTGWGRLSRKLINGIRDKQSGKTILDFLKSDGFANRNFMQLIHDDSLTFKEDIQKAQVSGQGHSLHEQIANLAGSPAIKKGILQTVKIVDELVKVMGHKPENIVIEMARENQTTQKGQKNSRERMKRIEEGIKELGSQILKEHPVENTQLQNEKLYLYYLQNGRDMYVDQELDINRLSDYDVDHIVPQSFIKDDSIDNKVLTRSDKNRGKSDNVPSEEVVKKMKNYWRQLLNAKLITQRKFDNLTKAERGGLSELDKAGFIKRQLVETRQITKHVAQILDSRMNTKYDENDKLIREVKVITLKSKLVSDFRKDFQFYKVREINNYHHAHDAYLNAVVGTALIKKYPKLESEFVYGDYKVYDVRKMIAKSEQEIGKATAKYFFYSNIMNFFKTEITLANGEIRKRPLIETNGETGEIVWDKGRDFATVRKVLSMPQVNIVKKTEVQTGGFSKESILPKRNSDKLIARKKDWDPKKYGGFDSPTVAYSVLVVAKVEKGKSKKLKSVKELLGITIMERSSFEKNPIDFLEAKGYKEVKKDLIIKLPKYSLFELENGRKRMLASAGELQKGNELALPSKYVNFLYLASHYEKLKGSPEDNEQKQLFVEQHKHYLDEIIEQISEFSKRVILADANLDKVLSAYNKHRDKPIREQAENIIHLFTLTNLGAPAAFKYFDTTIDRKRYTSTKEVLDATLIHQSITGLYETRIDLSQLGGD

SEQ ID NO: 9 - DNA, 4212 bp, Streptococcus pyogenes
atggataaaaagtattctattggtttagacatcggcactaattccgttggatgggctgtcataaccgatgaatacaaagtaccttcaaagaaatttaaggtgttggggaacacagaccgtcattcgattaaaaagaatcttatcggtgccctcctattcgatagtggcgaaacggcagaggcgactcgcctgaaacgaaccgctcggagaaggtatacacgtcgcaagaaccgaatatgttacttacaagaaatttttagcaatgagatggccaaagttgacgattctttctttcaccgtttggaagagtccttccttgtcgaagaggacaagaaacatgaacggcaccccatctttggaaacatagtagatgaggtggcatatcatgaaaagtacccaacgatttatcacctcagaaaaaagctagttgactcaactgataaagcggacctgaggttaatctacttggctcttgcccatatgataaagttccgtgggcactttctcattgagggtgatctaaatccggacaactcggatgtcgacaaactgttcatccagttagtacaaacctataatcagttgtttgaagagaaccctataaatgcaagtggcgtggatgcgaaggctattcttagcgcccgcctctctaaatcccgacggctagaaaacctgatcgcacaattacccggagagaagaaaaatgggttgttcggtaaccttatagcgctctcactaggcctgacaccaaattttaagtcgaacttcgacttagctgaagatgccaaattgcagcttagtaaggacacgtacgatgacgatctcgacaatctactggcacaaattggagatcagtatgcggacttatttttggctgccaaaaaccttagcgatgcaatcctcctatctgacatactgagagttaatactgagattaccaaggcgccgttatccgcttcaatgatcaaaaggtacgatgaacatcaccaagacttgacacttctcaaggccctagtccgtcagcaactgcctgagaaatataaggaaatattctttgatcagtcgaaaaacgggtacgcaggttatattgacggcggagcgagtcaagaggaattctacaagtttatcaaacccatattagagaagatggatgggacggaagagttgcttgtaaaactcaatcgcgaagatctactgcgaaagcagcggactttcgacaacggtagcattccacatcaaatccacttaggcgaattgcatgctatacttagaaggcaggaggatttttatccgttcctcaaagacaatcgtgaaaagattgagaaaatcctaacctttcgcataccttactatgtgggacccctggcccgagggaactctcggttcgcatggatgacaagaaagtccgaagaaacgattactccatggaattttgaggaagttgtcgataaaggtgcgtcagctcaatcgttcatcgagaggatgaccaactttgacaagaatttaccgaacgaaaaagtattgcctaagcacagtttactttacgagtatttcacagtgtacaatgaactcacgaaagttaagtatgtcactgagggcatgcgtaaacccgcctttctaagcggagaacagaagaaagcaatagtagatctgttattcaagaccaaccgcaaagtgacagttaagcaattgaaagaggactactttaagaaaattgaatgcttcgattctgtcgagatctccggggtagaagatcgatttaatgcgtcacttggtacgtatcatgacctcctaaagataattaaagataaggacttcctggataacgaagagaatgaagatatcttagaagatatagtgttgactcttaccctctttgaagatcgggaaatgattgaggaaagactaaaaacatacgctcacctgttcgacgataaggttatgaaacagttaaagaggcgtcgctatacgggctggggacgattgtcgcggaaacttatcaacgggataagagacaagcaaagtggtaaaactattctcgattttctaaagagcgacggcttcgccaataggaactttatgcagctgatccatgatgactctttaaccttcaaagaggatatacaaaaggcacaggtttccggacaaggggactcattgcacgaacatattgcgaatcttgctggttcgccagccatcaaaaagggcatactccagacagtcaaagtagtggatgagctagttaaggtcatgggacgtcacaaaccggaaaacattgtaatcgagatggcacgcgaaaatcaaacgactcagaaggggcaaaaaaacagtcgagagcggatgaagagaatagaagagggtattaaagaactgggcagccagatcttaaaggagcatcctgtggaaaatacccaattgcagaacgagaaactttacctctattacctacaaaatggaagggacatgtatgttgatcaggaactggacataaaccgtttatctgattacgacgtcgatcacattgtaccccaatcctttttgaaggacgattcaatcgacaataaagtgcttacacgctcggataagaaccgagggaaaagtgacaatgttccaagcgaggaagtcgtaaagaaaatgaagaactattggcggcagctcctaaatgcgaaactgataacgcaaagaaagttcgataacttaactaaagctgagaggggtggcttgtctgaacttgacaaggccggatttattaaacgtcagctcgtggaaacccgccaaatcacaaagcatgttgcacagatactagattcccgaatgaatacgaaatacgacgagaacgataagctgattcgggaagtcaaagtaatcactttaaagtcaaaattggtgtcggacttcagaaaggattttcaattctataaagttagggagataaataactaccaccatgcgcacgacgcttatcttaatgccgtcgtagggaccgcactcattaagaaatacccgaagctagaaagtgagtttgtgtatggtgattacaaagtttatgacgtccgtaagatgatcgcgaaaagcgaacaggagataggcaaggctacagccaaatacttcttttattctaacattatgaatttctttaagacggaaatcactctggcaaacggagagatacgcaaacgacctttaattgaaaccaatggggagacaggtgaaatcgtatgggataagggccgggacttcgcgacggtgagaaaagttttgtccatgccccaagtcaacatagtaaagaaaactgaggtgcagaccggagggttttcaaaggaatcgattcttccaaaaaggaatagtgataagctcatcgctcgtaaaaaggactgggacccgaaaaagtacggtggcttcgatagccctacagttgcctattctgtcctagtagtggcaaaagttgagaagggaaaatccaagaaactgaagtcagtcaaagaattattggggataacgattatggagcgctcgtcttttgaaaagaaccccatcgacttccttgaggcgaaaggttacaaggaagtaaaaaaggatctcataattaaactaccaaagtatagtctgtttgagttagaaaatggccgaaaacggatgttggctagcgccggagagcttcaaaaggggaacgaactcgcactaccgtctaaatacgtgaatttcctgtatttagcgtcccattacgagaagttgaaaggttcacctgaagataacgaacagaagcaactttttgttgagcagcacaaacattatctcgacgaaatcatagagcaaatttcggaattcagtaagagagtcatcctagctgatgccaatctggacaaagtattaagcgcatacaacaagcacagggataaacccatacgtgagcaggcggaaaatattatccatttgtttactcttaccaacctcggcgctccagccgcattcaagtattttgacacaacgatagatcgcaaacgatacacttctaccaaggaggtgctagacgcgacactgattcaccaatccatcacgggattatatgaaactcggatagatttgtcacagcttgggggtgacggatcccccaagaagaagaggaaagtctcgagcgactacaaagaccatgacggtgattataaagatcatgacatcgattacaaggatgacgatgacaaggctgcagga

SEQ ID NO: 10 - protein, 1404 aa, Streptococcus pyogenes
MDKKYSIGLDIGTNSVGWAVITDEYKVPSKKFKVLGNTDRHSIKKNLIGALLFDSGETAEATRLKRTARRRYTRRKNRICYLQEIFSNEMAKVDDSFFHRLEESFLVEEDKKHERHPIFGNIVDEVAYHEKYPTIYHLRKKLVDSTDKADLRLIYLALAHMIKFRGHFLIEGDLNPDNSDVDKLFIQLVQTYNQLFEENPINASGVDAKAILSARLSKSRRLENLIAQLPGEKKNGLFGNLIALSLGLTPNFKSNFDLAEDAKLQLSKDTYDDDLDNLLAQIGDQYADLFLAAKNLSDAILLSDILRVNTEITKAPLSASMIKRYDEHHQDLTLLKALVRQQLPEKYKEIFFDQSKNGYAGYIDGGASQEEFYKFIKPILEKMDGTEELLVKLNREDLLRKQRTFDNGSIPHQIHLGELHAILRRQEDFYPFLKDNREKIEKILTFRIPYYVGPLARGNSRFAWMTRKSEETITPWNFEEVVDKGASAQSFIERMTNFDKNLPNEKVLPKHSLLYEYFTVYNELTKVKYVTEGMRKPAFLSGEQKKAIVDLLFKTNRKVTVKQLKEDYFKKIECFDSVEISGVEDRFNASLGTYHDLLKIIKDKDFLDNEENEDILEDIVLTLTLFEDREMIEERLKTYAHLFDDKVMKQLKRRRYTGWGRLSRKLINGIRDKQSGKTILDFLKSDGFANRNFMQLIHDDSLTFKEDIQKAQVSGQGDSLHEHIANLAGSPAIKKGILQTVKVVDELVKVMGRHKPENIVIEMARENQTTQKGQKNSRERMKRIEEGIKELGSQILKEHPVENTQLQNEKLYLYYLQNGRDMYVDQELDINRLSDYDVDHIVPQSFLKDDSIDNKVLTRSDKNRGKSDNVPSEEVVKKMKNYWRQLLNAKLITQRKFDNLTKAERGGLSELDKAGFIKRQLVETRQITKHVAQILDSRMNTKYDENDKLIREVKVITLKSKLVSDFRKDFQFYKVREINNYHHAHDAYLNAVVGTALIKKYPKLESEFVYGDYKVYDVRKMIAKSEQEIGKATAKYFFYSNIMNFFKTEITLANGEIRKRPLIETNGETGEIVWDKGRDFATVRKVLSMPQVNIVKKTEVQTGGFSKESILPKRNSDKLIARKKDWDPKKYGGFDSPTVAYSVLVVAKVEKGKSKKLKSVKELLGITIMERSSFEKNPIDFLEAKGYKEVKKDLIIKLPKYSLFELENGRKRMLASAGELQKGNELALPSKYVNFLYLASHYEKLKGSPEDNEQKQLFVEQHKHYLDEIIEQISEFSKRVILADANLDKVLSAYNKHRDKPIREQAENIIHLFTLTNLGAPAAFKYFDTTIDRKRYTSTKEVLDATLIHQSITGLYETRIDLSQLGGDGSPKKKRKVSSDYKDHDGDYKDHDIDYKDDDDKAAG

SEQ ID NO: 11 - DNA, 4107 bp, Streptococcus pyogenes
atggataagaaatactcaataggcttagatatcggcacaaatagcgtcggatgggcggtgatcactgatgaatataaggttccgtctaaaaagttcaaggttctgggaaatacagaccgccacagtatcaaaaaaaatcttataggggctcttttatttgacagtggagagacagcggaagcgactcgtctcaaacggacagctcgtagaaggtatacacgtcggaagaatcgtatttgttatctacaggagattttttcaaatgagatggcgaaagtagatgatagtttctttcatcgacttgaagagtcttttttggtggaagaagacaagaagcatgaacgtcatcctatttttggaaatatagtagatgaagttgcttatcatgagaaatatccaactatctatcatctgcgaaaaaaattggtagattctactgataaagcggatttgcgcttaatctatttggccttagcgcatatgattaagtttcgtggtcattttttgattgagggagatttaaatcctgataatagtgatgtggacaaactatttatccagttggtacaaacctacaatcaattatttgaagaaaaccctattaacgcaagtggagtagatgctaaagcgattctttctgcacgattgagtaaatcaagacgattagaaaatctcattgctcagctccccggtgagaagaaaaatggcttatttgggaatctcattgctttgtcattgggtttgacccctaattttaaatcaaattttgatttggcagaagatgctaaattacagctttcaaaagatacttacgatgatgatttagataatttattggcgcaaattggagatcaatatgctgatttgtttttggcagctaagaatttatcagatgctattttactttcagatatcctaagagtaaatactgaaataactaaggctcccctatcagcttcaatgattaaacgctacgatgaacatcatcaagacttgactcttttaaaagctttagttcgacaacaacttccagaaaagtataaagaaatcttttttgatcaatcaaaaaacggatatgcaggttatattgatgggggagctagccaagaagaattttataaatttatcaaaccaattttagaaaaaatggatggtactgaggaattattggtgaaactaaatcgtgaagatttgctgcgcaagcaacggacctttgacaacggctctattccccatcaaattcacttgggtgagctgcatgctattttgagaagacaagaagacttttatccatttttaaaagacaatcgtgagaagattgaaaaaatcttgacttttcgaattccttattatgttggtccattggcgcgtggcaatagtcgttttgcatggatgactcggaagtctgaagaaacaattaccccatggaattttgaagaagttgtcgataaaggtgcttcagctcaatcatttattgaacgcatgacaaactttgataaaaatcttccaaatgaaaaagtactaccaaaacatagtttgctttatgagtattttacggtttataacgaattgacaaaggtcaaatatgttactgaaggaatgcgaaaaccagcatttctttcaggtgaacagaagaaagccattgttgatttactcttcaaaacaaatcgaaaagtaaccgttaagcaattaaaagaagattatttcaaaaaaatagaatgttttgatagtgttgaaatttcaggagttgaagatagatttaatgcttcattaggtacctaccatgatttgctaaaaattattaaagataaagattttttggataatgaagaaaatgaagatatcttagaggatattgttttaacattgaccttatttgaagatagggagatgattgaggaaagacttaaaacatatgctcacctctttgatgataaggtgatgaaacagcttaaacgtcgccgttatactggttggggacgtttgtctcgaaaattgattaatggtattagggataagcaatctggcaaaacaatattagattttttgaaatcagatggttttgccaatcgcaattttatgcagctgatccatgatgatagtttgacatttaaagaagacattcaaaaagcacaagtgtctggacaaggcgatagtttacatgaacatattgcaaatttagctggtagccctgctattaaaaaaggtattttacagactgtaaaagttgttgatgaattggtcaaagtaatggggcggcataagccagaaaatatcgttattgaaatggcacgtgaaaatcagacaactcaaaagggccagaaaaattcgcgagagcgtatgaaacgaatcgaagaaggtatcaaagaattaggaagtcagattcttaaagagcatcctgttgaaaatactcaattgcaaaatgaaaagctctatctctattatctccaaaatggaagagacatgtatgtggaccaagaattagatattaatcgtttaagtgattatgatgtcgatcacattgttccacaaagtttccttaaagacgattcaatagacaataaggtcttaacgcgttctgataaaaatcgtggtaaatcggataacgttccaagtgaagaagtagtcaaaaagatgaaaaactattggagacaacttctaaacgccaagttaatcactcaacgtaagtttgataatttaacgaaagctgaacgtggaggtttgagtgaacttgataaagctggttttatcaaacgccaattggttgaaactcgccaaatcactaagcatgtggcacaaattttggatagtcgcatgaatactaaatacgatgaaaatgataaacttattcgagaggttaaagtgattaccttaaaatctaaattagtttctgacttccgaaaagatttccaattctataaagtacgtgagattaacaattaccatcatgcccatgatgcgtatctaaatgccgtcgttggaactgctttgattaagaaatatccaaaacttgaatcggagtttgtctatggtgattataaagtttatgatgttcgtaaaatgattgctaagtctgagcaagaaataggcaaagcaaccgcaaaatatttcttttactctaatatcatgaacttcttcaaaacagaaattacacttgcaaatggagagattcgcaaacgccctctaatcgaaactaatggggaaactggagaaattgtctgggataaagggcgagattttgccacagtgcgcaaagtattgtccatgccccaagtcaatattgtcaagaaaacagaagtacagacaggcggattctccaaggagtcaattttaccaaaaagaaattcggacaagcttattgctcgtaaaaaagactgggatccaaaaaaatatggtggttttgatagtccaacggtagcttattcagtcctagtggttgctaaggtggaaaaagggaaatcgaagaagttaaaatccgttaaagagttactagggatcacaattatggaaagaagttcctttgaaaaaaatccgattgactttttagaagctaaaggatataaggaagttaaaaaagacttaatcattaaactacctaaatatagtctttttgagttagaaaacggtcgtaaacggatgctggctagtgccggagaattacaaaaaggaaatgagctggctctgccaagcaaatatgtgaattttttatatttagctagtcattatgaaaagttgaagggtagtccagaagataacgaacaaaaacaattgtttgtggagcagcataagcattatttagatgagattattgagcaaatcagtgaattttctaagcgtgttattttagcagatgccaatttagataaagttcttagtgcatataacaaacatagagacaaaccaatacgtgaacaagcagaaaatattattcatttatttacgttgacgaatcttggagctcccgctgcttttaaatattttgatacaacaattgatcgtaaacgatatacgtctacaaaagaagttttagatgccactcttatccatcaatccatcactggtctttatgaaacacgcattgatttgagtcagctaggaggtgactga

SEQ ID NO: 12 - protein, 1368 aa, Streptococcus pyogenes [sequence omitted]

SEQ ID NO: 13 - protein, 1378 aa, Lactobacillus fermentum
MKEYHIGLDIGTSSIGWAVTDSQFKLMRIKGKTAIGVRLFEEGKTAAERRTFRTTRRRLKRRKWRLHYLDEIFAPHLQEVDENFLRRLKQSNIHPEDPTKNQAFIGKLLFPDLLKKNERGYPTLIKMRDELPVEQRAHYPVMNIYKLREAMINEDRQFDLREVYLAVHHIVKYRGHFLNNASVDKFKVGRIDFDKSFNVLNEAYEELQNGEGSFTIEPSKVEKIGQLLLDTKMRKLDRQKAVAKLLEVKVADKEETKRNKQIATAMSKLVLGYKADFATVAMANGNEWKIDLSSETSEDEIEKFREELSDAQNDILTEITSLFSQIMLNEIVPNGMSISESMMDRYWTHERQLAEVKEYLATQPASARKEFDQVYNKYIGQAPKERGFDLEKGLKKILSKKENWKEIDELLKAGDFLPKQRTSANGVIPHQMHQQELDRIIEKQAKYYPWLATENPATGERDRHQAKYELDQLVSFRIPYYVGPLVTPEVQKATSGAKFAWAKRKEDGEITPWNLWDKIDRAESAEAFIKRMTVKDTYLLNEDVLPANSLLYQKYNVLNELNNVRVNGRRLSVGIKQDIYTELFKKKKTVKASDVASLVMAKTRGVNKPSVEGLSDPKKFNSNLATYLDLKSIVGDKVDDNRYQTDLENIIEWRSVFEDGEIFADKLTEVEWLTDEQRSALVKKRYKGWGRLSKKLLTGIVDENGQRIIDLMWNTDQNFKEIVDQPVFKEQIDQLNQKAITNDGMTLRERVESVLDDAYTSPQNKKAIWQVVRVVEDIVKAVGNAPKSISIEFARNEGNKGEITRSRRTQLQKLFEDQAHELVKDTSLTEELEKAPDLSDRYYFYFTQGGKDMYTGDPINFDEISTKYDIDHILPQSFVKDNSLDNRVLTSRKENNKKSDQVPAKLYAAKMKPYWNQLLKQGLITQRKFENLTKDVDQNIKYRSLGFVKRQLVETRQVIKLTANILGSMYQEAGTEIIETRAGLTKQLREEFDLPKVREVNDYHHAVDAYLTTFAGQYLNRRYPKLRSFFVYGEYMKFKHGSDLKLRNFNFFHELMEGDKSQGKVVDQQTGELITTRDEVAKSFDRLLNMKYMLVSKEVHDRSDQLYGATIVTAKESGKLTSPIEIKKNRLVDLYGAYTNGTSAFMTIIKFTGNKPKYKVIGIPTTSAASLKRAGKPGSESYNQELHRIIKSNPKVKKGFEIVVPHVSYGQLIVDGDCKFTLASPTVQHPATQLVLSKKSLETISSGYKILKDKPAIANERLIRVFDEVVGQMNRYFTIFDQRSNRQKVADARDKFLSLPTESKYEGAKKVQVGKTEVITNLLMGLHANATQGDLKVLGLATFGFFQSTTGLSLSEDTMIVYQSPTGLFERRICLKDI

SEQ ID NO: 14 - protein, 1368 aa, Streptococcus pyogenes [sequence omitted]

SEQ ID NO: 15 - protein, 1053 aa, Staphylococcus aureus
MGKRNYILGLDIGITSVGYGIIDYETRDVIDAGVRLFKEANVENNEGRRSKRGARRLKRRRRHRIQRVKKLLFDYNLLTDHSELSGINPYEARVKGLSQKLSEEEFSAALLHLAKRRGVHNVNEVEEDTGNELSTKEQISRNSKALEEKYVAELQLERLKKDGEVRGSINRFKTSDYVKEAKQLLKVQKAYHQLDQSFIDTYIDLLETRRTYYEGPGEGSPFGWKDIKEWYEMLMGHCTYFPEELRSVKYAYNADLYNALNDLNNLVITRDENEKLEYYEKFQIIENVFKQKKKPTLKQIAKEILVNEEDIKGYRVTSTGKPEFTNLKVYHDIKDITARKEIIENAELLDQIAKILTIYQSSEDIQEELTNLNSELTQEEIEQISNLKGYTGTHNLSLKAINLILDELWHTNDNQIAIFNRLKLVPKKVDLSQQKEIPTTLVDDFILSPVVKRSFIQSIKVINAIIKKYGLPNDIIIELAREKNSKDAQKMINEMQKRNRQTNERIEEIIRTTGKENAKYLIEKIKLHDMQEGKCLYSLEAIPLEDLLNNPFNYEVDHIIPRSVSFDNSFNNKVLVKQEENSKKGNRTPFQYLSSSDSKISYETFKKHILNLAKGKGRISKTKKEYLLEERDINRFSVQKDFINRNLVDTRYATRGLMNLLRSYFRVNNLDVKVKSINGGFTSFLRRKWKFKKERNKGYKHHAEDALIIANADFIFKEWKKLDKAKKVMENQMFEEKQAESMPEIETEQEYKEIFITPHQIKHIKDFKDYKYSHRVDKKPNRKLINDTLYSTRKDDKGNTLIVNNLNGLYDKDNDKLKKLINKSPEKLLMYHHDPQTYQKLKLIMEQYGDEKNPLYKYYEETGNYLTKYSKKDNGPVIKKIKYYGNKLNAHLDITDDYPNSRNKVVKLSLKPYRFDVYLDNGVYKFVTVKNLDVIKKENYYEVNSKCYEEAKKLKKISNQAEFIASFYKNDLIKINGELYRVIGVNNDLLNRIEVNMIDITYREYLENMNDKRPPHIIKTIASKTQSIKKYSTDILGNLYEVKSKKHPQIIKK

SEQ ID NO: 16 - protein, 1409 aa, Streptococcus thermophilus
MLFNKCIIISINLDFSNKEKCMTKPYSIGLDIGTNSVGWAVITDNYKVPSKKMKVLGNTSKKYIKKNLLGVLLFDSGITAEGRRLKRTARRRYTRRRNRILYLQEIFSTEMATLDDAFFQRLDDSFLVPDDKRDSKYPIFGNLVEEKVYHDEFPTIYHLRKYLADSTKKADLRLVYLALAHMIKYRGHFLIEGEFNSKNNDIQKNFQDFLDTYNAIFESDLSLENSKQLEEIVKDKISKLEKKDRILKLFPGEKNSGIFSEFLKLIVGNQADFRKCFNLDEKASLHFSKESYDEDLETLLGYIGDDYSDVFLKAKKLYDAILLSGFLTVTDNETEAPLSSAMIKRYNEHKEDLALLKEYIRNISLKTYNEVFKDDTKNGYAGYIDGKTNQEDFYVYLKNLLAEFEGADYFLEKIDREDFLRKQRTFDNGSIPYQIHLQEMRAILDKQAKFYPFLAKNKERIEKILTFRIPYYVGPLARGNSDFAWSIRKRNEKITPWNFEDVIDKESSAEAFINRMTSFDLYLPEEKVLPKHSLLYETFNVYNELTKVRFIAESMRDYQFLDSKQKKDIVRLYFKDKRKVTDKDIIEYLHAIYGYDGIELKGIEKQFNSSLSTYHDLLNIINDKEFLDDSSNEAIIEEIIHTLTIFEDREMIKQRLSKFENIFDKSVLKKLSRRHYTGWGKLSAKLINGIRDEKSGNTILDYLIDDGISNRNFMQLIHDDALSFKKKIQKAQIIGDEDKGNIKEVVKSLPGSPAIKKGILQSIKIVDELVKVMGGRKPESIVVEMARENQYTNQGKSNSQQRLKRLEKSLKELGSKILKENIPAKLSKIDNNALQNDRLYLYYLQNGKDMYTGDDLDIDRLSNYDIDHIIPQAFLKDNSIDNKVLVSSASNRGKSDDFPSLEVVKKRKTFWYQLLKSKLISQRKFDNLTKAERGGLLPEDKAGFIQRQLVETRQITKHVARLLDEKFNNKKDENNRAVRTVKIITLKSTLVSQFRKDFELYKVREINDFHHAHDAYLNAVIASALLKKYPKLEPEFVYGDYPKYNSFRERKSATEKVYFYSNIMNIFKKSISLADGRVIERPLIEVNEETGESVWNKESDLATVRRVLSYPQVNVVKKVEEQNHGLDRGKPKGLFNANLSSKPKPNSNENLVGAKEYLDPKKYGGYAGISNSFAVLVKGTIEKGAKKKITNVLEFQGISILDRINYRKDKLNFLLEKGYKDIELIIELPKYSLFELSDGSRRMLASILSTNNKRGEIHKGNQIFLSQKFVKLLYHAKRISNTINENHRKYVENHKKEFEELFYYILEFNENYVGAKKNGKLLNSAFQSWQNHSIDELCSSFIGPTGSERKGLFELTSRGSAADFEFLGVKIPRYRDYTPSSLLKDATLIHQSVTGLYETRIDLAKLGEG

SEQ ID NO: 17 - protein, 1402 aa, Lactobacillus crispatus
MKIKNYNLALTPSTSAVGHVEVDDDLNILEPVHHQKAIGVAKFGEGETAEARRLARSARRTTKRRANRINHYFNEIMKPEIDKVDPLMFDRIKQAGLSPLDERKEFRTVIFDRPNIASYYHNQFPTIWHLQKYLMITDEKADIRLIYWALHSLLKHRGHFFNTTPMSQFKPGKLNLKDDMLALDDYNDLEGLSFAVANSPEIEKVIKDRSMHKKEKIAELKKLIVNDVPDKDLAKRNNKIITQIVNAIMGNSFHLNFIFDMDLDKLTSKAWSFKLDDPELDTKFDAISGSMTDNQIGIFETLQKIYSAISLLDILNGSSNVVDAKNALYDKHKRDLNLYFKFLNTLPDEIAKTLKAGYTLYIGNRKKDLLAARKLLKVNVAKNFSQDDFYKLINKELKSIDKQGLQTRFSEKVGELVAQNNFLPVQRSSDNVFIPYQLNAITFNKILENQGKYYDFLVKPNPAKKDRKNAPYELSQLMQFTIPYYVGPLVTPEEQVKSGIPKTSRFAWMVRKDNGAITPWNFYDKVDIEATADKFIKRSIAKDSYLLSELVLPKHSLLYEKYEVFNELSNVSLDGKKLSGGVKQILFNEVFKKTNKVNTSRILKALAKHNIPGSKITGLSNPEEFTSSLQTYNAWKKYFPNQIDNFAYQQDLEKMIEWSTVFEDHKILAKKLDEIEWLDDDQKKFVANTRLRGWGRLSKRLLTGLKDNYGKSIMQRLETTKANFQQIVYKPEFREQIDKISQAAAKNQSLEDILANSYTSPSNRKAIRKTMSVVDEYIKLNHGKEPDKIFLMFQRSEQEKGKQTEARSKQLNRILSQLKADKSANKLFSKQLADEFSNAIKKSKYKLNDKQYFYFQQLGRDALTGEVIDYDELYKYTVLHIIPRSKLTDDSQNNKVLTKYKIVDGSVALKFGNSYSDALGMPIKAFWTELNRLKLIPKGKLLNLTTDFSTLNKYQRDGYIARQLVETQQIVKLLATIMQSRFKHTKIIEVRNSQVANIRYQFDYFRIKNLNEYYRGFDAYLAAVVGTYLYKVYPKARRLFVYGQYLKPKKTNQENQDMHLDSEKKSQGFNFLWNLLYGKQDQIFVNGTDVIAFNRKDLITKMNTVYNYKSQKISLAIDYHNGAMFKATLFPRNDRDTAKTRKLIPKKKDYDTDIYGGYTSNVDGYMLLAEIIKRDGNKQYGFYGVPSRLVSELDTLKKTRYTEYEEKLKEIIKPELGVDLKKIKKIKILKNKVPFNQVIIDKGSKFFITSTSYRWNYRQLILSAESQQTLMDLVVDPDFSNHKARKDARKNADERLIKVYEEILYQVKNYMPMFVELHRCYEKLVDAQKTFKSLKISDKAMVLNQILILLHSNATSPVLEKLGYHTRFTLGKKHNLISENAVLVTQSITGLKENHVSIKQML

SEQ ID NO: 18 - protein, 1385 aa, Pedicoccus damnosus
MTNEKYSIGLDIGTSSIGFAVVNDNNRVIRVKGKNAIGVRLFDEGKAAADRRSFRTTRRSFRTTRRRLSRRRWRLKLLREIFDAYITPVDEAFFIRLKESNLSPKDSKKQYSGDILFNDRSDKDFYEKYPTIYHLRNALMTEHRKFDVREIYLAIHHIMKFRGHFLNATPANNFKVGRLNLEEKFEELNDIYQRVFPDESIEFRTDNLEQIKEVLLDNKRSRADRQRTLVSDIYQSSEDKDIEKRNKAVATEILKASLGNKAKLNVITNVEVDKEAAKEWSITFDSESIDDDLAKIEGQMTDDGHEIIEVLRSLYSGITLSAIVPENHTLSQSMVAKYDLHKDHLKLFKKLINGMTDTKKAKNLRAAYDGYIDGVKGKVLPQEDFYKQVQVNLDDSAEANEIQTYIDQDIFMPKQRTKANGSIPHQLQQQELDQIIENQKAYYPWLAELNPNPDKKRQQLAKYKLDELVTFRVPYYVGPMITAKDQKNQSGAEFAWMIRKEPGNITPWNFDQKVDRMATANQFIKRMTTTDTYLLGEDVLPAQSLLYQKFEVLNELNKIRIDHKPISIEQKQQIFNDLFKQFKNVTIKHLQDYLVSQGQYSKRPLIEGLADEKRFNSSLSTYSDLCGIFGAKLVEENDRQEDLEKIIEWSTIFEDKKIYRAKLNDLTWLTDDQKEKLATKRYQGWGRLSRKLLVGLKNSEHRNIMDILWITNENFMQIQAEPDFAKLVTDANKGMLEKTDSQDVINDLYTSPQNKKAIRQILLVVHDIQNAMHGQAPAKIHVEFARGEERNPRRSVQRQRQVEAAYEKVSNELVSAKVRQEFKEAINNKRDFKDRLFLYFMQGGIDIYTGKQLNIDQLSSYQIDHILPQAFVKDDSLTNRVLTNENQVKADSVPIDIFGKKMLSVWGRMKDQGLISKGKYRNLTMNPENISAHTENGFINRQLVETRQVIKLAVNILADEYGDSTQIISVKADLSHQMREDFELLKNRDVNDYHHAFDAYLAAFIGNYLLKRYPKLESYFVYGDFKKFTQKETKMRRFNFIYDLKHCDQVVNKETGEILWTKDEDIKYIRHLFAYKKILVSHEVREKRGALYNQTIYKAKDDKGSGQESKKLIRIKDDKETKIYGGYSGKSLAYMTIVQITKKNKVSYRVIGIPTLALARLNKLENDSTENNGELYKIIKPQFTHYKVDKKNGEIIETTDDFKIVVSKVRFQQLIDDAGQFFMLASDTYKNNAQQLVISNNALKAINNTNITDCPRDDLERLDNLRLDSAFDEIVKKMDKYFSAYDANNFREKIRNSNLIFYQLPVEDQWENNKITELGKRTVLTRILQGLHANATTTDMSIFKIKTPFGQLRQRSGISLSENAQLIYQSPTGLFERRVQLNKIK

SEQ ID NO: 19 - protein, 1367 aa, Fusobaterium nucleatum
MKKQKFSDYYLGFDIGTNSVGWCVTDLDYNVLRFNKKDMWGSRLFEEAKTAAERRVQRNSRRRLKRRKWRLNLLEEIFSNEILKIDSNFFRRLKESSLWLEDKSSKEKFTLFNDDNYKDYDFYKQYPTIFHLRNELIKNPEKKDIRLVYLAIHSIFKSRGHFLFEGQNLKEIKNFETLYNNLIAFLEDNGINKIIDKNNIEKLEKIVCDSKKGLKDKEKEFKEIFNSDKQLVAIFKLSVGSSVSLNDLFDTDEYKKGEVEKEKISFREQIYEDDKPIYYSILGEKIELLDIAKTFYDFMVLNNILADSQYISEAKVKLYEEHKKDLKNLKYIIRKYNKGNYDKLFKDKNENNYSAYIGLNKEKSKKEVIEKSRLKIDDLIKNIKGYLPKVEEIEEKDKAIFNKILNKIELKTILPKQRISDNGTLPYQIHEAELEKILENQSKYYDFLNYEENGIITKDKLLMTFKFRIPYYVGPLNSYHKDKGGNSWIVRKEEGKILPWNFEQKVDIEKSAEEFIKRMTNKCTYLNGEDVIPKDTFLYSEYVILNELNKVQVNDEFLNEENKRKIIDELFKENKKVSEKKFKEYLLVKQIVDGTIELKGVKDSFNSNYISYIRFKDIFGEKLNLDIYKEISEKSILWKCLYGDDKKIFEKKIKNEYGDILTKDEIKKINTFKFNNWGRLSEKLLTGIEFINLETGECYSSVMDALRRTNYNLMELLSSKFTLQESINNENKEMNEASYRDLIEESYVSPSLKRAIFQTLKIYEEIRKITGRVPKKVFIEMARGGDESMKNKKIPARQEQLKKLYDSCGNDIANFSIDIKEMKNSLISYDNNSLRQKKLYLYYLQFGKCMYTGREIDLDRLLQNNDTYDIDHIYPRSKVIKDDSFDNLVLVLKNENAEKSNEYPVKKEIQEKMKSFWRFLKEKNFISDEKYKRLTGKDDFELRGFMARQLVNVRQTTKEVGKILQQIEPEIKIVYSKAEIASSFREMFDFIKVRELNDTHHAKDAYLNIVAGNVYNTKFTEKPYRYLQEIKENYDVKKIYNYDIKNAWDKENSLEIVKKNMEKNTVNITRFIKEKKGQLFDLNPIKKGETSNEIISIKPKVYNGKDDKLNEKYGYYKSLNPAYFLYVEHKEKNKRIKSFERVNLVDVNNIKDEKSLVKYLIENKKLVEPRVIKKVYKRQVILINDYPYSIVTLDSNKLMDFENLKPLFLENKYEKILKNVIKFLEDNQGKSEENYKFIYLKKKDRYEKNETLESVKDRYNLEFNEMYDKFLEKLDSKDYKNYMNNKKYQELLDVKEKFIKLNLFDKAFTLKSFLDLFNRKTMADFSKVGLTKYLGKIQKISSNVLSKNELYLLEESVTGLFVKKIKL

SEQ ID NO: 20 - protein, 1346 aa, Enterococcus cecorum
MNKYYLGLDMGSASVGWAVTDENYHLVRRKGKDLWGVRTFDVAQTAKERRITRGNRRRQDRRKQRIQILQELLGEEVLKTDPGFFHRMKESRYVVEDKRTLDGKQVELPYALFVDKDYTDKEYYKQFPTINHLIVYLMTTSDTPDIRLVYLALHYYMKNRGNFLHSGDINNVKDINDILEQLDNVLETFLDGWNLKLKSYVEDIKNIYNRDLGRGERKKAFVNTLGAKTKAEKAFCSLISGGSTNLAELFDDSSLKEIETPKIEFASSSLEDKIDGIQEALEDRFAVIEAAKRLYDWKTLTDILGDSSSLAEARVNSYQMHHEQLLELKSLVKEYLDRKVFQEVFVSLNVANNYPAYIGHTKINGKKKELEVKRTKRNDFYSYVKKQVIEPIKKKVSDEAVLTKLSEIESLIEVDKYLPLQVNSDNGVIPYQVKLNELTRIFDNLENRIPVLRENRDKIIKTFKFRIPYYVGSLNGVVKNGKCTNWMVRKEEGKIYPWNFEDKVDLEASAEQFIRRMTNKCTYLVNEDVLPKYSLLYSKYLVLSELNNLRIDGRPLDVKIKQDIYENVFKKNRKVTLKKIKKYLLKEGIITDDDELSGLADDVKSSLTAYRDFKEKLGHLDLSEAQMENIILNITLFGDDKKLLKKRLAALYPFIDDKSLNRIATLNYRDWGRLSERFLSGITSVDQETGELRTIIQCMYETQANLMQLLAEPYHFVEAIEKENPKVDLESISYRIVNDLYVSPAVKRQIWQTLLVIKDIKQVMKHDPERIFIEMAREKQESKKTKSRKQVLSEVYKKAKEYEHLFEKLNSLTEEQLRSKKIYLYFTQLGKCMYSGEPIDFENLVSANSNYDIDHIYPQSKTIDDSFNNIVLVKKSLNAYKSNHYPIDKNIRDNEKVKTLWNTLVSKGLITKEKYERLIRSTPFSDEELAGFIARQLVETRQSTKAVAEILSNWFPESEIVYSKAKNVSNFRQDFEILKVRELNDCHHAHDAYLNIVVGNAYHTKFTNSPYRFIKNKANQEYNLRKLLQKVNKIESNGVVAWVGQSENNPGTIATVKKVIRRNTVLISRMVKEVDGQLFDLTLMKKGKGQVPIKSSDERLTDISKYGGYNKATGAYFTFVKSKKRGKVVRSFEYVPLHLSKQFENNNELLKEYIEKDRGLTDVEILIPKVLINSLFRYNGSLVRITGRGDTRLLLVHEQPLYVSNSFVQQLKSVSSYKLKKSENDNAKLTKTATEKLSNIDELYDGLLRKLDLPIYSYWFSSIKEYLVESRTKYIKLSIEEKALVIFEILHLFQSDAQVPNLKILGLSTKPSRIRIQKNLKDTDKMSIIHQSPSGIFEHEIELTSL

SEQ ID NO: 21 - protein, 1312 aa, Anaerostipes hadrus
MQNGFLGITVSSEQVGWAVTNPKYELERASRKDLWGVRLFDKAETAEDRRMFRTNRRLNQRKKNRIHYLRDIFHEEVNQKDPNFFQQLDESNFCEDDRTVEFNFDTNLYKNQFPTVYHLRKYLMETKDKPDIRLVYLAFSKFMKNRGHFLYKGNLGEVMDFENSMKGFCESLEKFNIDFPTLSDEQVKEVRDILCDHKIAKTVKKKNIITITKVKSKTAKAWIGLFCGCSVPVKVLFQDIDEEIVTDPEKISFEDASYDDYIANIEKGVGIYYEAIVSAKMLFDWSILNEILGDHQLLSDAMIAEYNKHHDDLKRLQKIIKGTGSRELYQDIFINDVSGNYVCYVGHAKTMSSADQKQFYTFLKNRLKNVNGISSEDAEWIDTEIKNGTLLPKQTKRDNSVIPHQLQLREFELILDNMQEMYPFLKENREKLLKIFNFVIPYYVGPLKGVVRKGESTNWMVPKKDGVIHPWNFDEMVDKEASAECFISRMTGNCSYLFNEKVLPKNSLLYETFEVLNELNPLKINGEPISVELKQRIYEQLFLTGKKVTKKSLTKYLIKNGYDKDIELSGIDNEFHSNLKSHIDFEDYDNLSDEEVEQIILRITVFEDKQLLKDYLNREFVKLSEDERKQICSLSYKGWGNLSEMLLNGITVTDSNGVEVSVMDMLWNTNLNLMQILSKKYGYKAEIEHYNKEHEKTIYNREDLMDYLNIPPAQRRKVNQLITIVKSLKKTYGVPNKIFFKISREHQDDPKRTSSRKEQLKYLYKSLKSEDEKHLMKELDELNDHELSNDKVYLYFLQKGRCIYSGKKLNLSRLRKSNYQNDIDYIYPLSAVNDRSMNNKVLTGIQENRADKYTYFPVDSEIQKKMKGFWMELVLQGFMTKEKYFRLSRENDFSKSELVSFIEREISDNQQSGRMIASVLQYYFPESKIVFVKEKLISSFKRDFHLISSYGHNHLQAAKDAYITIVVGNVYHTKFTMDPAIYFKNHKRKDYDLNRLFLENISRDGQIAWESGPYGSIQTVRKEYAQNHIAVTKRVVEVKGGLFKQMPLKKGHGEYPLKTNDPRFGNIAQYGGYTNVTGSYFVLVESMEKGKKRISLEYVPVYLHERLEDDPGHKLLKEYLVDHRKLNHPKILLAKVRKNSLLKIDGFYYRLNGRSGNALILTNAVELIMDDWQTKTANKISGYMKRRAIDKKARVYQNEFHIQELEQLYDFYLDKLKNGVYKNRKNNQAELIHNEKEQFMELKTEDQCVLLTEIKKLFVCSPMQADLTLIGGSKHTGMIAMSSNVTKADFAVIAEDPLGLRNKVIYSHKGEK

SEQ ID NO: 22 - protein, 1344 aa, Kandleria vitulina
MSQNNNKIYNIGLDIGDASVGWAVVDEHYNLLKRHGKHMWGSRLFTQANTAVERRSSRSTRRRYNKRRERIRLLREIMEDMVLDVDPTFFIRLANVSFLDQEDKKDYLKENYHSNYNLFIDKDFNDKTYYDKYPTIYHLRKHLCESKEKEDPRLIYLALHHIVKYRGNFLYEGQKFSMDVSNIEDKMIDVLRQFNEINLFEYVEDRKKIDEVLNVLKEPLSKKHKAEKAFALFDTTKDNKAAYKELCAALAGNKFNVTKMLKEAELHDEDEKDISFKFSDATFDDAFVEKQPLLGDCVEFIDLLHDIYSWVELQNILGSAHTSEPSISAAMIQRYEDHKNDLKLLKDVIRKYLPKKYFEVFRDEKSKKNNYCNYINHPSKTPVDEFYKYIKKLIEKIDDPDVKTILNKIELESFMLKQNSRTNGAVPYQMQLDELNKILENQSVYYSDLKDNEDKIRSILTFRIPYYFGPLNITKDRQFDWIIKKEGKENERILPWNANEIVDVDKTADEFIKRMRNFCTYFPDEPVMAKNSLTVSKYEVLNEINKLRINDHLIKRDMKDKMLHTLFMDHKSISANAMKKWLVKNQYFSNTDDIKIEGFQKENACSTSLTPWIDFTKIFGKINESNYDFIEKIIYDVTVFEDKKILRRRLKKEYDLDEEKIKKILKLKYSGWSRLSKKLLSGIKTKYKDSTRTPETVLEVMERTNMNLMQVINDEKLGFKKTIDDANSTSVSGKFSYAEVQELAGSPAIKRGIWQALLIVDEIKKIMKHEPAHVYIEFARNEDEKERKDSFVNQMLKLYKDYDFEDETEKEANKHLKGEDAKSKIRSERLKLYYTQMGKCMYTGKSLDIDRLDTYQVDHIVPQSLLKDDSIDNKVLVLSSENQRKLDDLVIPSSIRNKMYGFWEKLFNNKIISPKKFYSLIKTEFNEKDQERFINRQIVETRQITKHVAQIIDNHYENTKVVTVRADLSHQFRERYHIYKNRDINDFHHAHDAYIATILGTYIGHRFESLDAKYIYGEYKRIFRNQKNKGKEMKKNNDGFILNSMRNIYADKDTGEIVWDPNYIDRIKKCFYYKDCFVTKKLEENNGTFFNVTVLPNDTNSDKDNTLATVPVNKYRSNVNKYGGFSGVNSFIVAIKGKKKKGKKVIEVNKLTGIPLMYKNADEEIKINYLKQAEDLEEVQIGKEILKNQLIEKDGGLYYIVAPTEIINAKQLILNESQTKLVCEIYKAMKYKNYDNLDSEKIIDLYRLLINKMELYYPEYRKQLVKKFEDRYEQLKVISIEEKCNIIKQILATLHCNSSIGKIMYSDFKISTTIGRLNGRTISLDDISFIAESPTGMYSKKYKL

SEQ ID NO: 23 - protein, 1288 aa, Enterococcus faecalis
MRLFEEGHTAEDRRLKRTARRRISRRRNRLRYLQAFFEEAMTDLDENFFARLQESFLVPEDKKWHRHPIFAKLEDEVAYHETYPTIYHLRKKLADSSEQADLRLIYLALAHIVKYRGHFLIEGKLSTENTSVKDQFQQFMVIYNQTFVNGESRLVSAPLPESVLIEEELTEKASRTKKSEKVLQQFPQEKANGLFGQFLKLMVGNKADFKKVFGLEEEAKITYASESYEEDLEGILAKVGDEYSDVFLAAKNVYDAVELSTILADSDKKSHAKLSSSMIVRFTEHQEDLKKFKRFIRENCPDEYDNLFKNEQKDGYAGYIAHAGKVSQLKFYQYVKKIIQDIAGAEYFLEKIAQENFLRKQRTFDNGVIPHQIHLAELQAIIHRQAAYYPFLKENQEKIEQLVTFRIPYYVGPLSKGDASTFAWLKRQSEEPIRPWNLQETVDLDQSATAFIERMTNFDTYLPSEKVLPKHSLLYEKFMVFNELTKISYTDDRGIKANFSGKEKEKIFDYLFKTRRKVKKKDIIQFYRNEYNTEIVTLSGLEEDQFNASFSTYQDLLKCGLTRAELDHPDNAEKLEDIIKILTIFEDRQRIRTQLSTFKGQFSAEVLKKLERKHYTGWGRLSKKLINGIYDKESGKTILDYLVKDDGVSKHYNRNFMQLINDSQLSFKNAIQKAQSSEHEETLSETVNELAGSPAIKKGIYQSLKIVDELVAIMGYAPKRIVVEMARENQTTSTGKRRSIQRLKIVEKAMAEIGSNLLKEQPTTNEQLRDTRLFLYYMQNGKDMYTGDELSLHRLSHYDIDHIIPQSFMKDDSLDNLVLVGSTENRGKSDDVPSKEVVKDMKAYWEKLYAAGLISQRKFQRLTKGEQGGLTLEDKAHFIQRQLVETRQITKNVAGILDQRYNAKSKEKKVQIITLKASLTSQFRSIFGLYKVREVNDYHHGQDAYLNCVVATTLLKVYPNLAPEFVYGEYPKFQTFKENKATAKAIIYTNLLRFFTEDEPRFTKDGEILWSNSYLKTIKKELNYHQMNIVKKVEVQKGGFSKESIKPKGPSNKLIPVKNGLDPQKYGGFDSPVVAYTVLFTHEKGKKPLIKQEILGITIMEKTRFEQNPILFLEEKGFLRPRVLMKLPKYTLYEFPEGRRRLLASAKEAQKGNQMVLPEHLLTLLYHAKQCLLPNQSESLAYVEQHQPEFQEILERVVDFAEVHTLAKSKVQQIVKLFEANQTADVKEIAASFIQLMQFNAMGAPSTFKFFQKDIERARYTSIKEIFDATIIYQSPTGLYETRRKVVD

SEQ ID NO: 24 - protein, 1052 aa, Staphylococcus aureus
KRNYILGLDIGITSVGYGIIDYETRDVIDAGVRLFKEANVENNEGRRSKRGARRLKRRRRHRIQRVKKLLFDYNLLTDHSELSGINPYEARVKGLSQKLSEEEFSAALLHLAKRRGVHNVNEVEEDTGNELSTKEQISRNSKALEEKYVAELQLERLKKDGEVRGSINRFKTSDYVKEAKQLLKVQKAYHQLDQSFIDTYIDLLETRRTYYEGPGEGSPFGWKDIKEWYEMLMGHCTYFPEELRSVKYAYNADLYNALNDLNNLVITRDENEKLEYYEKFQIIENVFKQKKKPTLKQIAKEILVNEEDIKGYRVTSTGKPEFTNLKVYHDIKDITARKEIIENAELLDQIAKILTIYQSSEDIQEELTNLNSELTQEEIEQISNLKGYTGTHNLSLKAINLILDELWHTNDNQIAIFNRLKLVPKKVDLSQQKEIPTTLVDDFILSPVVKRSFIQSIKVINAIIKKYGLPNDIIIELAREKNSKDAQKMINEMQKRNRQTNERIEEIIRTTGKENAKYLIEKIKLHDMQEGKCLYSLEAIPLEDLLNNPFNYEVDHIIPRSVSFDNSFNNKVLVKQEENSKKGNRTPFQYLSSSDSKISYETFKKHILNLAKGKGRISKTKKEYLLEERDINRFSVQKDFINRNLVDTRYATRGLMNLLRSYFRVNNLDVKVKSINGGFTSFLRRKWKFKKERNKGYKHHAEDALIIANADFIFKEWKKLDKAKKVMENQMFEEKQAESMPEIETEQEYKEIFITPHQIKHIKDFKDYKYSHRVDKKPNRELINDTLYSTRKDDKGNTLIVNNLNGLYDKDNDKLKKLINKSPEKLLMYHHDPQTYQKLKLIMEQYGDEKNPLYKYYEETGNYLTKYSKKDNGPVIKKIKYYGNKLNAHLDITDDYPNSRNKVVKLSLKPYRFDVYLDNGVYKFVTVKNLDVIKKENYYEVNSKCYEEAKKLKKISNQAEFIASFYNNDLIKINGELYRVIGVNNDLLNRIEVNMIDITYREYLENMNDKRPPRIIKTIASKTQSIKKYSTDILGNLYEVKSKKHPQIIKKG

SEQ ID NO: 25 - protein, 1082 aa, Geobacillus thermodenitrificans
MKYKIGLDIGITSIGWAVINLDIPRIEDLGVRIFDRAENPKTGESLALPRRLARSARRRLRRRKHRLERIRRLFVREGILTKEELNKLFEKKHEIDVWQLRVEALDRKLNNDELARILLHLAKRRGFRSNRKSERTNKENSTMLKHIEENQSILSSYRTVAEMVVKDPKFSLHKRNKEDNYTNTVARDDLEREIKLIFAKQREYGNIVCTEAFEHEYISIWASQRPFASKDDIEKKVGFCTFEPKEKRAPKATYTFQSFTVWEHINKLRLVSPGGIRALTDDERRLIYKQAFHKNKITFHDVRTLLNLPDDTRFKGLLYDRNTTLKENEKVRFLELGAYHKIRKAIDSVYGKGAAKSFRPIDFDTFGYALTMFKDDTDIRSYLRNEYEQNGKRMENLADKVYDEELIEELLNLSFSKFGHLSLKALRNILPYMEQGEVYSTACERAGYTFTGPKKKQKTVLLPNIPPIANPVVMRALTQARKVVNAIIKKYGSPVSIHIELARELSQSFDERRKMQKEQEGNRKKNETAIRQLVEYGLTLNPTGLDIVKFKLWSEQNGKCAYSLQPIEIERLLEPGYTEVDHVIPYSRSLDDSYTNKVLVLTKENREKGNRTPAEYLGLGSERWQQFETFVLTNKQFSKKKRDRLLRLHYDENEENEFKNRNLNDTRYISRFLANFIREHLKFADSDDKQKVYTVNGRITAHLRSRWNFNKNREESNLHHAVDAAIVACTTPSDIARVTAFYQRREQNKELSKKTDPQFPQPWPHFADELQARLSKNPKESIKALNLGNYDNEKLESLQPVFVSRMPKRSITGAAHQETLRRYIGIDERSGKIQTVVKKKLSEIQLDKTGHFPMYGKESDPRTYEAIRQRLLEHNNDPKKAFQEPLYKPKKNGELGPIIRTIKIIDTTNQVIPLNDGKTVAYNSNIVRVDVFEKDGKYYCVPIYTIDMMKGILPNKAIEPNKPYSEWKEMTEDYTFRFSLYPNDLIRIEFPREKTIKTAVGEEIKIKDLFAYYQTIDSSNGGLSLVSHDNNFSLRSIGSRTLKRFEKYQVDVLGNIYKVRGEKRVGVASSSHSKAGETIRPL

SEQ ID NO: 26 - protein, 1375 aa, Streptococcus canis
MEKKYSIGLDIGTNSVGWAVITDDYKVPSKKFKVLGNTNRKSIKKNLMGALLFDSGETAEATRLKRTARRRYTRRKNRIRYLQEIFANEMAKLDDSFFQRLEESFLVEEDKKNERHPIFGNLADEVAYHRNYPTIYHLRKKLADSPEKADLRLIYLALAHIIKFRGHFLIEGKLNAENSDVAKLFYQLIQTYNQLFEESPLDEIEVDAKGILSARLSKSKRLEKLIAVFPNEKKNGLFGNIIALALGLTPNFKSNFDLTEDAKLQLSKDTYDDDLDELLGQIGDQYADLFSAAKNLSDAILLSDILRSNSEVTKAPLSASMVKRYDEHHQDLALLKTLVRQQFPEKYAEIFKDDTKNGYAGYVGIGIKHRKRTTKLATQEEFYKFIKPILEKMDGAEELLAKLNRDDLLRKQRTFDNGSIPHQIHLKELHAILRRQEEFYPFLKENREKIEKILTFRIPYYVGPLARGNSRFAWLTRKSEEAITPWNFEEVVDKGASAQSFIERMTNFDEQLPNKKVLPKHSLLYEYFTVYNELTKVKYVTERMRKPEFLSGEQKKAIVDLLFKTNRKVTVKQLKEDYFKKIECFDSVEIIGVEDRFNASLGTYHDLLKIIKDKDFLDNEENEDILEDIVLTLTLFEDREMIEERLKTYAHLFDDKVMKQLKRRHYTGWGRLSRKMINGIRDKQSGKTILDFLKSDGFSNRNFMQLIHDDSLTFKEEIEKAQVSGQGDSLHEQIADLAGSPAIKKGILQTVKIVDELVKVMGHKPENIVIEMARENQTTTKGLQQSRERKKRIEEGIKELESQILKENPVENTQLQNEKLYLYYLQNGRDMYVDQELDINRLSDYDVDHIVPQSFIKDDSIDNKVLTRSVENRGKSDNVPSEEVVKKMKNYWRQLLNAKLITQRKFDNLTKAERGGLSEADKAGFIKRQLVETRQITKHVARILDSRMNTKRDKNDKPIREVKVITLKSKLVSDFRKDFQLYKVRDINNYHHAHDAYLNAVVGTALIKKYPKLESEFVYGDYKVYDVRKMIAKSEQEIGKATAKRFFYSNIMNFFKTEVKLANGEIRKRPLIETNGETGEVVWNKEKDFATVRKVLAMPQVNIVKKTEVQTGGFSKESILSKRESAKLIPRKKGWDTRKYGGFGSPTVAYSILVVAKVEKGKAKKLKSVKVLVGITIMEKGSYEKDPIGFLEAKGYKDIKKELIFKLPKYSLFELENGRRRMLASATELQKANELVLPQHLVRLLYYTQNISATTGSNNLGYIEQHREEFKEIFEKIIDFSEKYILKNKVNSNLKSSFDEQFAVSDSILLSNSFVSLLKYTSFGASGGFTFLDLDVKQGRLRYQTVTEVLDATLIYQSITGLYETRTDLSQLGGD

SEQ ID NO: 27 - protein, 1368 aa, Streptococcus pyogenes
  misc_feature (10)..(10): Xaa can be any naturally occurring amino acid
  misc_feature (840)..(840): Xaa can be any naturally occurring amino acid
MDKKYSIGLXIGTNSVGWAVITDEYKVPSKKFKVLGNTDRHSIKKNLIGALLFDSGETAEATRLKRTARRRYTRRKNRICYLQEIFSNEMAKVDDSFFHRLEESFLVEEDKKHERHPIFGNIVDEVAYHEKYPTIYHLRKKLVDSTDKADLRLIYLALAHMIKFRGHFLIEGDLNPDNSDVDKLFIQLVQTYNQLFEENPINASGVDAKAILSARLSKSRRLENLIAQLPGEKKNGLFGNLIALSLGLTPNFKSNFDLAEDAKLQLSKDTYDDDLDNLLAQIGDQYADLFLAAKNLSDAILLSDILRVNTEITKAPLSASMIKRYDEHHQDLTLLKALVRQQLPEKYKEIFFDQSKNGYAGYIDGGASQEEFYKFIKPILEKMDGTEELLVKLNREDLLRKQRTFDNGSIPHQIHLGELHAILRRQEDFYPFLKDNREKIEKILTFRIPYYVGPLARGNSRFAWMTRKSEETITPWNFEEVVDKGASAQSFIERMTNFDKNLPNEKVLPKHSLLYEYFTVYNELTKVKYVTEGMRKPAFLSGEQKKAIVDLLFKTNRKVTVKQLKEDYFKKIECFDSVEISGVEDRFNASLGTYHDLLKIIKDKDFLDNEENEDILEDIVLTLTLFEDREMIEERLKTYAHLFDDKVMKQLKRRRYTGWGRLSRKLINGIRDKQSGKTILDFLKSDGFANRNFMQLIHDDSLTFKEDIQKAQVSGQGDSLHEHIANLAGSPAIKKGILQTVKVVDELVKVMGRHKPENIVIEMARENQTTQKGQKNSRERMKRIEEGIKELGSQILKEHPVENTQLQNEKLYLYYLQNGRDMYVDQELDINRLSDYDVDXIVPQSFLKDDSIDNKVLTRSDKNRGKSDNVPSEEVVKKMKNYWRQLLNAKLITQRKFDNLTKAERGGLSELDKAGFIKRQLVETRQITKHVAQILDSRMNTKYDENDKLIREVKVITLKSKLVSDFRKDFQFYKVREINNYHHAHDAYLNAVVGTALIKKYPKLESEFVYGDYKVYDVRKMIAKSEQEIGKATAKYFFYSNIMNFFKTEITLANGEIRKRPLIETNGETGEIVWDKGRDFATVRKVLSMPQVNIVKKTEVQTGGFSKESILPKRNSDKLIARKKDWDPKKYGGFDSPTVAYSVLVVAKVEKGKSKKLKSVKELLGITIMERSSFEKNPIDFLEAKGYKEVKKDLIIKLPKYSLFELENGRKRMLASAGELQKGNELALPSKYVNFLYLASHYEKLKGSPEDNEQKQLFVEQHKHYLDEIIEQISEFSKRVILADANLDKVLSAYNKHRDKPIREQAENIIHLFTLTNLGAPAAFKYFDTTIDRKRYTSTKEVLDATLIHQSITGLYETRIDLSQLGGD

SEQ ID NO: 28 - protein, 1368 aa, Streptococcus pyogenes
MDKKYSIGLAIGTNSVGWAVITDEYKVPSKKFKVLGNTDRHSIKKNLIGALLFDSGETAEATRLKRTARRRYTRRKNRICYLQEIFSNEMAKVDDSFFHRLEESFLVEEDKKHERHPIFGNIVDEVAYHEKYPTIYHLRKKLVDSTDKADLRLIYLALAHMIKFRGHFLIEGDLNPDNSDVDKLFIQLVQTYNQLFEENPINASGVDAKAILSARLSKSRRLENLIAQLPGEKKNGLFGNLIALSLGLTPNFKSNFDLAEDAKLQLSKDTYDDDLDNLLAQIGDQYADLFLAAKNLSDAILLSDILRVNTEITKAPLSASMIKRYDEHHQDLTLLKALVRQQLPEKYKEIFFDQSKNGYAGYIDGGASQEEFYKFIKPILEKMDGTEELLVKLNREDLLRKQRTFDNGSIPHQIHLGELHAILRRQEDFYPFLKDNREKIEKILTFRIPYYVGPLARGNSRFAWMTRKSEETITPWNFEEVVDKGASAQSFIERMTNFDKNLPNEKVLPKHSLLYEYFTVYNELTKVKYVTEGMRKPAFLSGEQKKAIVDLLFKTNRKVTVKQLKEDYFKKIECFDSVEISGVEDRFNASLGTYHDLLKIIKDKDFLDNEENEDILEDIVLTLTLFEDREMIEERLKTYAHLFDDKVMKQLKRRRYTGWGRLSRKLINGIRDKQSGKTILDFLKSDGFANRNFMQLIHDDSLTFKEDIQKAQVSGQGDSLHEHIANLAGSPAIKKGILQTVKVVDELVKVMGRHKPENIVIEMARENQTTQKGQKNSRERMKRIEEGIKELGSQILKEHPVENTQLQNEKLYLYYLQNGRDMYVDQELDINRLSDYDVDAIVPQSFLKDDSIDNKVLTRSDKNRGKSDNVPSEEVVKKMKNYWRQLLNAKLITQRKFDNLTKAERGGLSELDKAGFIKRQLVETRQITKHVAQILDSRMNTKYDENDKLIREVKVITLKSKLVSDFRKDFQFYKVREINNYHHAHDAYLNAVVGTALIKKYPKLESEFVYGDYKVYDVRKMIAKSEQEIGKATAKYFFYSNIMNFFKTEITLANGEIRKRPLIETNGETGEIVWDKGRDFATVRKVLSMPQVNIVKKTEVQTGGFSKESILPKRNSDKLIARKKDWDPKKYGGFDSPTVAYSVLVVAKVEKGKSKKLKSVKELLGITIMERSSFEKNPIDFLEAKGYKEVKKDLIIKLPKYSLFELENGRKRMLASAGELQKGNELALPSKYVNFLYLASHYEKLKGSPEDNEQKQLFVEQHKHYLDEIIEQISEFSKRVILADANLDKVLSAYNKHRDKPIREQAENIIHLFTLTNLGAPAAFKYFDTTIDRKRYTSTKEVLDATLIHQSITGLYETRIDLSQLGGD

SEQ ID NO: 29 - protein, 1368 aa, Streptococcus pyogenes
  misc_feature (10)..(10): Xaa can be any naturally occurring amino acid
MDKKYSIGLXIGTNSVGWAVITDEYKVPSKKFKVLGNTDRHSIKKNLIGALLFDSGETAEATRLKRTARRRYTRRKNRICYLQEIFSNEMAKVDDSFFHRLEESFLVEEDKKHERHPIFGNIVDEVAYHEKYPTIYHLRKKLVDSTDKADLRLIYLALAHMIKFRGHFLIEGDLNPDNSDVDKLFIQLVQTYNQLFEENPINASGVDAKAILSARLSKSRRLENLIAQLPGEKKNGLFGNLIALSLGLTPNFKSNFDLAEDAKLQLSKDTYDDDLDNLLAQIGDQYADLFLAAKNLSDAILLSDILRVNTEITKAPLSASMIKRYDEHHQDLTLLKALVRQQLPEKYKEIFFDQSKNGYAGYIDGGASQEEFYKFIKPILEKMDGTEELLVKLNREDLLRKQRTFDNGSIPHQIHLGELHAILRRQEDFYPFLKDNREKIEKILTFRIPYYVGPLARGNSRFAWMTRKSEETITPWNFEEVVDKGASAQSFIERMTNFDKNLPNEKVLPKHSLLYEYFTVYNELTKVKYVTEGMRKPAFLSGEQKKAIVDLLFKTNRKVTVKQLKEDYFKKIECFDSVEISGVEDRFNASLGTYHDLLKIIKDKDFLDNEENEDILEDIVLTLTLFEDREMIEERLKTYAHLFDDKVMKQLKRRRYTGWGRLSRKLINGIRDKQSGKTILDFLKSDGFANRNFMQLIHDDSLTFKEDIQKAQVSGQGDSLHEHIANLAGSPAIKKGILQTVKVVDELVKVMGRHKPENIVIEMARENQTTQKGQKNSRERMKRIEEGIKELGSQILKEHPVENTQLQNEKLYLYYLQNGRDMYVDQELDINRLSDYDVDHIVPQSFLKDDSIDNKVLTRSDKNRGKSDNVPSEEVVKKMKNYWRQLLNAKLITQRKFDNLTKAERGGLSELDKAGFIKRQLVETRQITKHVAQILDSRMNTKYDENDKLIREVKVITLKSKLVSDFRKDFQFYKVREINNYHHAHDAYLNAVVGTALIKKYPKLESEFVYGDYKVYDVRKMIAKSEQEIGKATAKYFFYSNIMNFFKTEITLANGEIRKRPLIETNGETGEIVWDKGRDFATVRKVLSMPQVNIVKKTEVQTGGFSKESILPKRNSDKLIARKKDWDPKKYGGFDSPTVAYSVLVVAKVEKGKSKKLKSVKELLGITIMERSSFEKNPIDFLEAKGYKEVKKDLIIKLPKYSLFELENGRKRMLASAGELQKGNELALPSKYVNFLYLASHYEKLKGSPEDNEQKQLFVEQHKHYLDEIIEQISEFSKRVILADANLDKVLSAYNKHRDKPIREQAENIIHLFTLTNLGAPAAFKYFDTTIDRKRYTSTKEVLDATLIHQSITGLYETRIDLSQLGGD

SEQ ID NO: 30 - protein, 1368 aa, Streptococcus pyogenes
  misc_feature (762)..(762): Xaa can be any naturally occurring amino acid
MDKKYSIGLDIGTNSVGWAVITDEYKVPSKKFKVLGNTDRHSIKKNLIGALLFDSGETAEATRLKRTARRRYTRRKNRICYLQEIFSNEMAKVDDSFFHRLEESFLVEEDKKHERHPIFGNIVDEVAYHEKYPTIYHLRKKLVDSTDKADLRLIYLALAHMIKFRGHFLIEGDLNPDNSDVDKLFIQLVQTYNQLFEENPINASGVDAKAILSARLSKSRRLENLIAQLPGEKKNGLFGNLIALSLGLTPNFKSNFDLAEDAKLQLSKDTYDDDLDNLLAQIGDQYADLFLAAKNLSDAILLSDILRVNTEITKAPLSASMIKRYDEHHQDLTLLKALVRQQLPEKYKEIFFDQSKNGYAGYIDGGASQEEFYKFIKPILEKMDGTEELLVKLNREDLLRKQRTFDNGSIPHQIHLGELHAILRRQEDFYPFLKDNREKIEKILTFRIPYYVGPLARGNSRFAWMTRKSEETITPWNFEEVVDKGASAQSFIERMTNFDKNLPNEKVLPKHSLLYEYFTVYNELTKVKYVTEGMRKPAFLSGEQKKAIVDLLFKTNRKVTVKQLKEDYFKKIECFDSVEISGVEDRFNASLGTYHDLLKIIKDKDFLDNEENEDILEDIVLTLTLFEDREMIEERLKTYAHLFDDKVMKQLKRRRYTGWGRLSRKLINGIRDKQSGKTILDFLKSDGFANRNFMQLIHDDSLTFKEDIQKAQVSGQGDSLHEHIANLAGSPAIKKGILQTVKVVDELVKVMGRHKPENIVIXMARENQTTQKGQKNSRERMKRIEEGIKELGSQILKEHPVENTQLQNEKLYLYYLQNGRDMYVDQELDINRLSDYDVDHIVPQSFLKDDSIDNKVLTRSDKNRGKSDNVPSEEVVKKMKNYWRQLLNAKLITQRKFDNLTKAERGGLSELDKAGFIKRQLVETRQITKHVAQILDSRMNTKYDENDKLIREVKVITLKSKLVSDFRKDFQFYKVREINNYHHAHDAYLNAVVGTALIKKYPKLESEFVYGDYKVYDVRKMIAKSEQEIGKATAKYFFYSNIMNFFKTEITLANGEIRKRPLIETNGETGEIVWDKGRDFATVRKVLSMPQVNIVKKTEVQTGGFSKESILPKRNSDKLIARKKDWDPKKYGGFDSPTVAYSVLVVAKVEKGKSKKLKSVKELLGITIMERSSFEKNPIDFLEAKGYKEVKKDLIIKLPKYSLFELENGRKRMLASAGELQKGNELALPSKYVNFLYLASHYEKLKGSPEDNEQKQLFVEQHKHYLDEIIEQISEFSKRVILADANLDKVLSAYNKHRDKPIREQAENIIHLFTLTNLGAPAAFKYFDTTIDRKRYTSTKEVLDATLIHQSITGLYETRIDLSQLGGD

SEQ ID NO: 31 - protein, 1368 aa, Streptococcus pyogenes
  misc_feature (983)..(983): Xaa can be any naturally occurring amino acid
MDKKYSIGLDIGTNSVGWAVITDEYKVPSKKFKVLGNTDRHSIKKNLIGALLFDSGETAEATRLKRTARRRYTRRKNRICYLQEIFSNEMAKVDDSFFHRLEESFLVEEDKKHERHPIFGNIVDEVAYHEKYPTIYHLRKKLVDSTDKADLRLIYLALAHMIKFRGHFLIEGDLNPDNSDVDKLFIQLVQTYNQLFEENPINASGVDAKAILSARLSKSRRLENLIAQLPGEKKNGLFGNLIALSLGLTPNFKSNFDLAEDAKLQLSKDTYDDDLDNLLAQIGDQYADLFLAAKNLSDAILLSDILRVNTEITKAPLSASMIKRYDEHHQDLTLLKALVRQQLPEKYKEIFFDQSKNGYAGYIDGGASQEEFYKFIKPILEKMDGTEELLVKLNREDLLRKQRTFDNGSIPHQIHLGELHAILRRQEDFYPFLKDNREKIEKILTFRIPYYVGPLARGNSRFAWMTRKSEETITPWNFEEVVDKGASAQSFIERMTNFDKNLPNEKVLPKHSLLYEYFTVYNELTKVKYVTEGMRKPAFLSGEQKKAIVDLLFKTNRKVTVKQLKEDYFKKIECFDSVEISGVEDRFNASLGTYHDLLKIIKDKDFLDNEENEDILEDIVLTLTLFEDREMIEERLKTYAHLFDDKVMKQLKRRRYTGWGRLSRKLINGIRDKQSGKTILDFLKSDGFANRNFMQLIHDDSLTFKEDIQKAQVSGQGDSLHEHIANLAGSPAIKKGILQTVKVVDELVKVMGRHKPENIVIEMARENQTTQKGQKNSRERMKRIEEGIKELGSQILKEHPVENTQLQNEKLYLYYLQNGRDMYVDQELDINRLSDYDVDHIVPQSFLKDDSIDNKVLTRSDKNRGKSDNVPSEEVVKKMKNYWRQLLNAKLITQRKFDNLTKAERGGLSELDKAGFIKRQLVETRQITKHVAQILDSRMNTKYDENDKLIREVKVITLKSKLVSDFRKDFQFYKVREINNYHXAHDAYLNAVVGTALIKKYPKLESEFVYGDYKVYDVRKMIAKSEQEIGKATAKYFFYSNIMNFFKTEITLANGEIRKRPLIETNGETGEIVWDKGRDFATVRKVLSMPQVNIVKKTEVQTGGFSKESILPKRNSDKLIARKKDWDPKKYGGFDSPTVAYSVLVVAKVEKGKSKKLKSVKELLGITIMERSSFEKNPIDFLEAKGYKEVKKDLIIKLPKYSLFELENGRKRMLASAGELQKGNELALPSKYVNFLYLASHYEKLKGSPEDNEQKQLFVEQHKHYLDEIIEQISEFSKRVILADANLDKVLSAYNKHRDKPIREQAENIIHLFTLTNLGAPAAFKYFDTTIDRKRYTSTKEVLDATLIHQSITGLYETRIDLSQLGGD

SEQ ID NO: 32 - protein, 1368 aa, Streptococcus pyogenes
  misc_feature (986)..(986): Xaa can be any naturally occurring amino acid
MDKKYSIGLDIGTNSVGWAVITDEYKVPSKKFKVLGNTDRHSIKKNLIGALLFDSGETAEATRLKRTARRRYTRRKNRICYLQEIFSNEMAKVDDSFFHRLEESFLVEEDKKHERHPIFGNIVDEVAYHEKYPTIYHLRKKLVDSTDKADLRLIYLALAHMIKFRGHFLIEGDLNPDNSDVDKLFIQLVQTYNQLFEENPINASGVDAKAILSARLSKSRRLENLIAQLPGEKKNGLFGNLIALSLGLTPNFKSNFDLAEDAKLQLSKDTYDDDLDNLLAQIGDQYADLFLAAKNLSDAILLSDILRVNTEITKAPLSASMIKRYDEHHQDLTLLKALVRQQLPEKYKEIFFDQSKNGYAGYIDGGASQEEFYKFIKPILEKMDGTEELLVKLNREDLLRKQRTFDNGSIPHQIHLGELHAILRRQEDFYPFLKDNREKIEKILTFRIPYYVGPLARGNSRFAWMTRKSEETITPWNFEEVVDKGASAQSFIERMTNFDKNLPNEKVLPKHSLLYEYFTVYNELTKVKYVTEGMRKPAFLSGEQKKAIVDLLFKTNRKVTVKQLKEDYFKKIECFDSVEISGVEDRFNASLGTYHDLLKIIKDKDFLDNEENEDILEDIVLTLTLFEDREMIEERLKTYAHLFDDKVMKQLKRRRYTGWGRLSRKLINGIRDKQSGKTILDFLKSDGFANRNFMQLIHDDSLTFKEDIQKAQVSGQGDSLHEHIANLAGSPAIKKGILQTVKVVDELVKVMGRHKPENIVIEMARENQTTQKGQKNSRERMKRIEEGIKELGSQILKEHPVENTQLQNEKLYLYYLQNGRDMYVDQELDINRLSDYDVDHIVPQSFLKDDSIDNKVLTRSDKNRGKSDNVPSEEVVKKMKNYWRQLLNAKLITQRKFDNLTKAERGGLSELDKAGFIKRQLVETRQITKHVAQILDSRMNTKYDENDKLIREVKVITLKSKLVSDFRKDFQFYKVREINNYHHAHXAYLNAVVGTALIKKYPKLESEFVYGDYKVYDVRKMIAKSEQEIGKATAKYFFYSNIMNFFKTEITLANGEIRKRPLIETNGETGEIVWDKGRDFATVRKVLSMPQVNIVKKTEVQTGGFSKESILPKRNSDKLIARKKDWDPKKYGGFDSPTVAYSVLVVAKVEKGKSKKLKSVKELLGITIMERSSFEKNPIDFLEAKGYKEVKKDLIIKLPKYSLFELENGRKRMLASAGELQKGNELALPSKYVNFLYLASHYEKLKGSPEDNEQKQLFVEQHKHYLDEIIEQISEFSKRVILADANLDKVLSAYNKHRDKPIREQAENIIHLFTLTNLGAPAAFKYFDTTIDRKRYTSTKEVLDATLIHQSITGLYETRIDLSQLGGD

SEQ ID NO: 33 - protein, 1368 aa, Streptococcus pyogenes
MDKKYSIGLAIGTNSVGWAVITDEYKVPSKKFKVLGNTDRHSIKKNLIGALLFDSGETAEATRLKRTARRRYTRRKNRICYLQEIFSNEMAKVDDSFFHRLEESFLVEEDKKHERHPIFGNIVDEVAYHEKYPTIYHLRKKLVDSTDKADLRLIYLALAHMIKFRGHFLIEGDLNPDNSDVDKLFIQLVQTYNQLFEENPINASGVDAKAILSARLSKSRRLENLIAQLPGEKKNGLFGNLIALSLGLTPNFKSNFDLAEDAKLQLSKDTYDDDLDNLLAQIGDQYADLFLAAKNLSDAILLSDILRVNTEITKAPLSASMIKRYDEHHQDLTLLKALVRQQLPEKYKEIFFDQSKNGYAGYIDGGASQEEFYKFIKPILEKMDGTEELLVKLNREDLLRKQRTFDNGSIPHQIHLGELHAILRRQEDFYPFLKDNREKIEKILTFRIPYYVGPLARGNSRFAWMTRKSEETITPWNFEEVVDKGASAQSFIERMTNFDKNLPNEKVLPKHSLLYEYFTVYNELTKVKYVTEGMRKPAFLSGEQKKAIVDLLFKTNRKVTVKQLKEDYFKKIECFDSVEISGVEDRFNASLGTYHDLLKIIKDKDFLDNEENEDILEDIVLTLTLFEDREMIEERLKTYAHLFDDKVMKQLKRRRYTGWGRLSRKLINGIRDKQSGKTILDFLKSDGFANRNFMQLIHDDSLTFKEDIQKAQVSGQGDSLHEHIANLAGSPAIKKGILQTVKVVDELVKVMGRHKPENIVIEMARENQTTQKGQKNSRERMKRIEEGIKELGSQILKEHPVENTQLQNEKLYLYYLQNGRDMYVDQELDINRLSDYDVDHIVPQSFLKDDSIDNKVLTRSDKNRGKSDNVPSEEVVKKMKNYWRQLLNAKLITQRKFDNLTKAERGGLSELDKAGFIKRQLVETRQITKHVAQILDSRMNTKYDENDKLIREVKVITLKSKLVSDFRKDFQFYKVREINNYHHAHDAYLNAVVGTALIKKYPKLESEFVYGDYKVYDVRKMIAKSEQEIGKATAKYFFYSNIMNFFKTEITLANGEIRKRPLIETNGETGEIVWDKGRDFATVRKVLSMPQVNIVKKTEVQTGGFSKESILPKRNSDKLIARKKDWDPKKYGGFDSPTVAYSVLVVAKVEKGKSKKLKSVKELLGITIMERSSFEKNPIDFLEAKGYKEVKKDLIIKLPKYSLFELENGRKRMLASAGELQKGNELALPSKYVNFLYLASHYEKLKGSPEDNEQKQLFVEQHKHYLDEIIEQISEFSKRVILADANLDKVLSAYNKHRDKPIREQAENIIHLFTLTNLGAPAAFKYFDTTIDRKRYTSTKEVLDATLIHQSITGLYETRIDLSQLGGD

SEQ ID NO: 34 - protein, 1368 aa, Streptococcus pyogenes
MDKKYSIGLDIGTNSVGWAVITDEYKVPSKKFKVLGNTDRHSIKKNLIGALLFDSGETAEATRLKRTARRRYTRRKNRICYLQEIFSNEMAKVDDSFFHRLEESFLVEEDKKHERHPIFGNIVDEVAYHEKYPTIYHLRKKLVDSTDKADLRLIYLALAHMIKFRGHFLIEGDLNPDNSDVDKLFIQLVQTYNQLFEENPINASGVDAKAILSARLSKSRRLENLIAQLPGEKKNGLFGNLIALSLGLTPNFKSNFDLAEDAKLQLSKDTYDDDLDNLLAQIGDQYADLFLAAKNLSDAILLSDILRVNTEITKAPLSASMIKRYDEHHQDLTLLKALVRQQLPEKYKEIFFDQSKNGYAGYIDGGASQEEFYKFIKPILEKMDGTEELLVKLNREDLLRKQRTFDNGSIPHQIHLGELHAILRRQEDFYPFLKDNREKIEKILTFRIPYYVGPLARGNSRFAWMTRKSEETITPWNFEEVVDKGASAQSFIERMTNFDKNLPNEKVLPKHSLLYEYFTVYNELTKVKYVTEGMRKPAFLSGEQKKAIVDLLFKTNRKVTVKQLKEDYFKKIECFDSVEISGVEDRFNASLGTYHDLLKIIKDKDFLDNEENEDILEDIVLTLTLFEDREMIEERLKTYAHLFDDKVMKQLKRRRYTGWGRLSRKLINGIRDKQSGKTILDFLKSDGFANRNFMQLIHDDSLTFKEDIQKAQVSGQGDSLHEHIANLAGSPAIKKGILQTVKVVDELVKVMGRHKPENIVIAMARENQTTQKGQKNSRERMKRIEEGIKELGSQILKEHPVENTQLQNEKLYLYYLQNGRDMYVDQELDINRLSDYDVDHIVPQSFLKDDSIDNKVLTRSDKNRGKSDNVPSEEVVKKMKNYWRQLLNAKLITQRKFDNLTKAERGGLSELDKAGFIKRQLVETRQITKHVAQILDSRMNTKYDENDKLIREVKVITLKSKLVSDFRKDFQFYKVREINNYHHAHDAYLNAVVGTALIKKYPKLESEFVYGDYKVYDVRKMIAKSEQEIGKATAKYFFYSNIMNFFKTEITLANGEIRKRPLIETNGETGEIVWDKGRDFATVRKVLSMPQVNIVKKTEVQTGGFSKESILPKRNSDKLIARKKDWDPKKYGGFDSPTVAYSVLVVAKVEKGKSKKLKSVKELLGITIMERSSFEKNPIDFLEAKGYKEVKKDLIIKLPKYSLFELENGRKRMLASAGELQKGNELALPSKYVNFLYLASHYEKLKGSPEDNEQKQLFVEQHKHYLDEIIEQISEFSKRVILADANLDKVLSAYNKHRDKPIREQAENIIHLFTLTNLGAPAAFKYFDTTIDRKRYTSTKEVLDATLIHQSITGLYETRIDLSQLGGD

SEQ ID NO: 35 - protein, 1368 aa, Streptococcus pyogenes
MDKKYSIGLDIGTNSVGWAVITDEYKVPSKKFKVLGNTDRHSIKKNLIGALLFDSGETAEATRLKRTARRRYTRRKNRICYLQEIFSNEMAKVDDSFFHRLEESFLVEEDKKHERHPIFGNIVDEVAYHEKYPTIYHLRKKLVDSTDKADLRLIYLALAHMIKFRGHFLIEGDLNPDNSDVDKLFIQLVQTYNQLFEENPINASGVDAKAILSARLSKSRRLENLIAQLPGEKKNGLFGNLIALSLGLTPNFKSNFDLAEDAKLQLSKDTYDDDLDNLLAQIGDQYADLFLAAKNLSDAILLSDILRVNTEITKAPLSASMIKRYDEHHQDLTLLKALVRQQLPEKYKEIFFDQSKNGYAGYIDGGASQEEFYKFIKPILEKMDGTEELLVKLNREDLLRKQRTFDNGSIPHQIHLGELHAILRRQEDFYPFLKDNREKIEKILTFRIPYYVGPLARGNSRFAWMTRKSEETITPWNFEEVVDKGASAQSFIERMTNFDKNLPNEKVLPKHSLLYEYFTVYNELTKVKYVTEGMRKPAFLSGEQKKAIVDLLFKTNRKVTVKQLKEDYFKKIECFDSVEISGVEDRFNASLGTYHDLLKIIKDKDFLDNEENEDILEDIVLTLTLFEDREMIEERLKTYAHLFDDKVMKQLKRRRYTGWGRLSRKLINGIRDKQSGKTILDFLKSDGFANRNFMQLIHDDSLTFKEDIQKAQVSGQGDSLHEHIANLAGSPAIKKGILQTVKVVDELVKVMGRHKPENIVIEMARENQTTQKGQKNSRERMKRIEEGIKELGSQILKEHPVENTQLQNEKLYLYYLQNGRDMYVDQELDINRLSDYDVDHIVPQSFLKDDSIDNKVLTRSDKNRGKSDNVPSEEVVKKMKNYWRQLLNAKLITQRKFDNLTKAERGGLSELDKAGFIKRQLVETRQITKHVAQILDSRMNTKYDENDKLIREVKVITLKSKLVSDFRKDFQFYKVREINNYHAAHDAYLNAVVGTALIKKYPKLESEFVYGDYKVYDVRKMIAKSEQEIGKATAKYFFYSNIMNFFKTEITLANGEIRKRPLIETNGETGEIVWDKGRDFATVRKVLSMPQVNIVKKTEVQTGGFSKESILPKRNSDKLIARKKDWDPKKYGGFDSPTVAYSVLVVAKVEKGKSKKLKSVKELLGITIMERSSFEKNPIDFLEAKGYKEVKKDLIIKLPKYSLFELENGRKRMLASAGELQKGNELALPSKYVNFLYLASHYEKLKGSPEDNEQKQLFVEQHKHYLDEIIEQISEFSKRVILADANLDKVLSAYNKHRDKPIREQAENIIHLFTLTNLGAPAAFKYFDTTIDRKRYTSTKEVLDATLIHQSITGLYETRIDLSQLGGD

SEQ ID NO: 36 - protein, 1368 aa, Streptococcus pyogenes
MDKKYSIGLDIGTNSVGWAVITDEYKVPSKKFKVLGNTDRHSIKKNLIGALLFDSGETAEATRLKRTARRRYTRRKNRICYLQEIFSNEMAKVDDSFFHRLEESFLVEEDKKHERHPIFGNIVDEVAYHEKYPTIYHLRKKLVDSTDKADLRLIYLALAHMIKFRGHFLIEGDLNPDNSDVDKLFIQLVQTYNQLFEENPINASGVDAKAILSARLSKSRRLENLIAQLPGEKKNGLFGNLIALSLGLTPNFKSNFDLAEDAKLQLSKDTYDDDLDNLLAQIGDQYADLFLAAKNLSDAILLSDILRVNTEITKAPLSASMIKRYDEHHQDLTLLKALVRQQLPEKYKEIFFDQSKNGYAGYIDGGASQEEFYKFIKPILEKMDGTEELLVKLNREDLLRKQRTFDNGSIPHQIHLGELHAILRRQEDFYPFLKDNREKIEKILTFRIPYYVGPLARGNSRFAWMTRKSEETITPWNFEEVVDKGASAQSFIERMTNFDKNLPNEKVLPKHSLLYEYFTVYNELTKVKYVTEGMRKPAFLSGEQKKAIVDLLFKTNRKVTVKQLKEDYFKKIECFDSVEISGVEDRFNASLGTYHDLLKIIKDKDFLDNEENEDILEDIVLTLTLFEDREMIEERLKTYAHLFDDKVMKQLKRRRYTGWGRLSRKLINGIRDKQSGKTILDFLKSDGFANRNFMQLIHDDSLTFKEDIQKAQVSGQGDSLHEHIANLAGSPAIKKGILQTVKVVDELVKVMGRHKPENIVIEMARENQTTQKGQKNSRERMKRIEEGIKELGSQILKEHPVENTQLQNEKLYLYYLQNGRDMYVDQELDINRLSDYDVDHIVPQSFLKDDSIDNKVLTRSDKNRGKSDNVPSEEVVKKMKNYWRQLLNAKLITQRKFDNLTKAERGGLSELDKAGFIKRQLVETRQITKHVAQILDSRMNTKYDENDKLIREVKVITLKSKLVSDFRKDFQFYKVREINNYHHAHAAYLNAVVGTALIKKYPKLESEFVYGDYKVYDVRKMIAKSEQEIGKATAKYFFYSNIMNFFKTEITLANGEIRKRPLIETNGETGEIVWDKGRDFATVRKVLSMPQVNIVKKTEVQTGGFSKESILPKRNSDKLIARKKDWDPKKYGGFDSPTVAYSVLVVAKVEKGKSKKLKSVKELLGITIMERSSFEKNPIDFLEAKGYKEVKKDLIIKLPKYSLFELENGRKRMLASAGELQKGNELALPSKYVNFLYLASHYEKLKGSPEDNEQKQLFVEQHKHYLDEIIEQISEFSKRVILADANLDKVLSAYNKHRDKPIREQAENIIHLFTLTNLGAPAAFKYFDTTIDRKRYTSTKEVLDATLIHQSITGLYETRIDLSQLGGD

SEQ ID NO: 37 - protein, 1368 aa, Streptococcus pyogenes
  misc_feature (840)..(840): Xaa can be any naturally occurring amino acid
MDKKYSIGLDIGTNSVGWAVITDEYKVPSKKFKVLGNTDRHSIKKNLIGALLFDSGETAEATRLKRTARRRYTRRKNRICYLQEIFSNEMAKVDDSFFHRLEESFLVEEDKKHERHPIFGNIVDEVAYHEKYPTIYHLRKKLVDSTDKADLRLIYLALAHMIKFRGHFLIEGDLNPDNSDVDKLFIQLVQTYNQLFEENPINASGVDAKAILSARLSKSRRLENLIAQLPGEKKNGLFGNLIALSLGLTPNFKSNFDLAEDAKLQLSKDTYDDDLDNLLAQIGDQYADLFLAAKNLSDAILLSDILRVNTEITKAPLSASMIKRYDEHHQDLTLLKALVRQQLPEKYKEIFFDQSKNGYAGYIDGGASQEEFYKFIKPILEKMDGTEELLVKLNREDLLRKQRTFDNGSIPHQIHLGELHAILRRQEDFYPFLKDNREKIEKILTFRIPYYVGPLARGNSRFAWMTRKSEETITPWNFEEVVDKGASAQSFIERMTNFDKNLPNEKVLPKHSLLYEYFTVYNELTKVKYVTEGMRKPAFLSGEQKKAIVDLLFKTNRKVTVKQLKEDYFKKIECFDSVEISGVEDRFNASLGTYHDLLKIIKDKDFLDNEENEDILEDIVLTLTLFEDREMIEERLKTYAHLFDDKVMKQLKRRRYTGWGRLSRKLINGIRDKQSGKTILDFLKSDGFANRNFMQLIHDDSLTFKEDIQKAQVSGQGDSLHEHIANLAGSPAIKKGILQTVKVVDELVKVMGRHKPENIVIEMARENQTTQKGQKNSRERMKRIEEGIKELGSQILKEHPVENTQLQNEKLYLYYLQNGRDMYVDQELDINRLSDYDVDXIVPQSFLKDDSIDNKVLTRSDKNRGKSDNVPSEEVVKKMKNYWRQLLNAKLITQRKFDNLTKAERGGLSELDKAGFIKRQLVETRQITKHVAQILDSRMNTKYDENDKLIREVKVITLKSKLVSDFRKDFQFYKVREINNYHHAHDAYLNAVVGTALIKKYPKLESEFVYGDYKVYDVRKMIAKSEQEIGKATAKYFFYSNIMNFFKTEITLANGEIRKRPLIETNGETGEIVWDKGRDFATVRKVLSMPQVNIVKKTEVQTGGFSKESILPKRNSDKLIARKKDWDPKKYGGFDSPTVAYSVLVVAKVEKGKSKKLKSVKELLGITIMERSSFEKNPIDFLEAKGYKEVKKDLIIKLPKYSLFELENGRKRMLASAGELQKGNELALPSKYVNFLYLASHYEKLKGSPEDNEQKQLFVEQHKHYLDEIIEQISEFSKRVILADANLDKVLSAYNKHRDKPIREQAENIIHLFTLTNLGAPAAFKYFDTTIDRKRYTSTKEVLDATLIHQSITGLYETRIDLSQLGGD

SEQ ID NO: 38 - protein, 1368 aa, Streptococcus pyogenes
MDKKYSIGLDIGTNSVGWAVITDEYKVPSKKFKVLGNTDRHSIKKNLIGALLFDSGETAEATRLKRTARRRYTRRKNRICYLQEIFSNEMAKVDDSFFHRLEESFLVEEDKKHERHPIFGNIVDEVAYHEKYPTIYHLRKKLVDSTDKADLRLIYLALAHMIKFRGHFLIEGDLNPDNSDVDKLFIQLVQTYNQLFEENPINASGVDAKAILSARLSKSRRLENLIAQLPGEKKNGLFGNLIALSLGLTPNFKSNFDLAEDAKLQLSKDTYDDDLDNLLAQIGDQYADLFLAAKNLSDAILLSDILRVNTEITKAPLSASMIKRYDEHHQDLTLLKALVRQQLPEKYKEIFFDQSKNGYAGYIDGGASQEEFYKFIKPILEKMDGTEELLVKLNREDLLRKQRTFDNGSIPHQIHLGELHAILRRQEDFYPFLKDNREKIEKILTFRIPYYVGPLARGNSRFAWMTRKSEETITPWNFEEVVDKGASAQSFIERMTNFDKNLPNEKVLPKHSLLYEYFTVYNELTKVKYVTEGMRKPAFLSGEQKKAIVDLLFKTNRKVTVKQLKEDYFKKIECFDSVEISGVEDRFNASLGTYHDLLKIIKDKDFLDNEENEDILEDIVLTLTLFEDREMIEERLKTYAHLFDDKVMKQLKRRRYTGWGRLSRKLINGIRDKQSGKTILDFLKSDGFANRNFMQLIHDDSLTFKEDIQKAQVSGQGDSLHEHIANLAGSPAIKKGILQTVKVVDELVKVMGRHKPENIVIEMARENQTTQKGQKNSRERMKRIEEGIKELGSQILKEHPVENTQLQNEKLYLYYLQNGRDMYVDQELDINRLSDYDVDAIVPQSFLKDDSIDNKVLTRSDKNRGKSDNVPSEEVVKKMKNYWRQLLNAKLITQRKFDNLTKAERGGLSELDKAGFIKRQLVETRQITKHVAQILDSRMNTKYDENDKLIREVKVITLKSKLVSDFRKDFQFYKVREINNYHHAHDAYLNAVVGTALIKKYPKLESEFVYGDYKVYDVRKMIAKSEQEIGKATAKYFFYSNIMNFFKTEITLANGEIRKRPLIETNGETGEIVWDKGRDFATVRKVLSMPQVNIVKKTEVQTGGFSKESILPKRNSDKLIARKKDWDPKKYGGFDSPTVAYSVLVVAKVEKGKSKKLKSVKELLGITIMERSSFEKNPIDFLEAKGYKEVKKDLIIKLPKYSLFELENGRKRMLASAGELQKGNELALPSKYVNFLYLASHYEKLKGSPEDNEQKQLFVEQHKHYLDEIIEQISEFSKRVILADANLDKVLSAYNKHRDKPIREQAENIIHLFTLTNLGAPAAFKYFDTTIDRKRYTSTKEVLDATLIHQSITGLYETRIDLSQLGGD

SEQ ID NO: 39 - protein, 1368 aa, Streptococcus pyogenes
  misc_feature (864)..(864): Xaa can be any naturally occurring amino acid
MDKKYSIGLDIGTNSVGWAVITDEYKVPSKKFKVLGNTDRHSIKKNLIGALLFDSGETAEATRLKRTARRRYTRRKNRICYLQEIFSNEMAKVDDSFFHRLEESFLVEEDKKHERHPIFGNIVDEVAYHEKYPTIYHLRKKLVDSTDKADLRLIYLALAHMIKFRGHFLIEGDLNPDNSDVDKLFIQLVQTYNQLFEENPINASGVDAKAILSARLSKSRRLENLIAQLPGEKKNGLFGNLIALSLGLTPNFKSNFDLAEDAKLQLSKDTYDDDLDNLLAQIGDQYADLFLAAKNLSDAILLSDILRVNTEITKAPLSASMIKRYDEHHQDLTLLKALVRQQLPEKYKEIFFDQSKNGYAGYIDGGASQEEFYKFIKPILEKMDGTEELLVKLNREDLLRKQRTFDNGSIPHQIHLGELHAILRRQEDFYPFLKDNREKIEKILTFRIPYYVGPLARGNSRFAWMTRKSEETITPWNFEEVVDKGASAQSFIERMTNFDKNLPNEKVLPKHSLLYEYFTVYNELTKVKYVTEGMRKPAFLSGEQKKAIVDLLFKTNRKVTVKQLKEDYFKKIECFDSVEISGVEDRFNASLGTYHDLLKIIKDKDFLDNEENEDILEDIVLTLTLFEDREMIEERLKTYAHLFDDKVMKQLKRRRYTGWGRLSRKLINGIRDKQSGKTILDFLKSDGFANRNFMQLIHDDSLTFKEDIQKAQVSGQGDSLHEHIANLAGSPAIKKGILQTVKVVDELVKVMGRHKPENIVIEMARENQTTQKGQKNSRERMKRIEEGIKELGSQILKEHPVENTQLQNEKLYLYYLQNGRDMYVDQELDINRLSDYDVDHIVPQSFLKDDSIDNKVLTRSDKNXGKSDNVPSEEVVKKMKNYWRQLLNAKLITQRKFDNLTKAERGGLSELDKAGFIKRQLVETRQITKHVAQILDSRMNTKYDENDKLIREVKVITLKSKLVSDFRKDFQFYKVREINNYHHAHDAYLNAVVGTALIKKYPKLESEFVYGDYKVYDVRKMIAKSEQEIGKATAKYFFYSNIMNFFKTEITLANGEIRKRPLIETNGETGEIVWDKGRDFATVRKVLSMPQVNIVKKTEVQTGGFSKESILPKRNSDKLIARKKDWDPKKYGGFDSPTVAYSVLVVAKVEKGKSKKLKSVKELLGITIMERSSFEKNPIDFLEAKGYKEVKKDLIIKLPKYSLFELENGRKRMLASAGELQKGNELALPSKYVNFLYLASHYEKLKGSPEDNEQKQLFVEQHKHYLDEIIEQISEFSKRVILADANLDKVLSAYNKHRDKPIREQAENIIHLFTLTNLGAPAAFKYFDTTIDRKRYTSTKEVLDATLIHQSITGLYETRIDLSQLGGD

SEQ ID NO: 40 - protein, 1368 aa, Streptococcus pyogenes
MDKKYSIGLDIGTNSVGWAVITDEYKVPSKKFKVLGNTDRHSIKKNLIGALLFDSGETAEATRLKRTARRRYTRRKNRICYLQEIFSNEMAKVDDSFFHRLEESFLVEEDKKHERHPIFGNIVDEVAYHEKYPTIYHLRKKLVDSTDKADLRLIYLALAHMIKFRGHFLIEGDLNPDNSDVDKLFIQLVQTYNQLFEENPINASGVDAKAILSARLSKSRRLENLIAQLPGEKKNGLFGNLIALSLGLTPNFKSNFDLAEDAKLQLSKDTYDDDLDNLLAQIGDQYADLFLAAKNLSDAILLSDILRVNTEITKAPLSASMIKRYDEHHQDLTLLKALVRQQLPEKYKEIFFDQSKNGYAGYIDGGASQEEFYKFIKPILEKMDGTEELLVKLNREDLLRKQRTFDNGSIPHQIHLGELHAILRRQEDFYPFLKDNREKIEKILTFRIPYYVGPLARGNSRFAWMTRKSEETITPWNFEEVVDKGASAQSFIERMTNFDKNLPNEKVLPKHSLLYEYFTVYNELTKVKYVTEGMRKPAFLSGEQKKAIVDLLFKTNRKVTVKQLKEDYFKKIECFDSVEISGVEDRFNASLGTYHDLLKIIKDKDFLDNEENEDILEDIVLTLTLFEDREMIEERLKTYAHLFDDKVMKQLKRRRYTGWGRLSRKLINGIRDKQSGKTILDFLKSDGFANRNFMQLIHDDSLTFKEDIQKAQVSGQGDSLHEHIANLAGSPAIKKGILQTVKVVDELVKVMGRHKPENIVIEMARENQTTQKGQKNSRERMKRIEEGIKELGSQILKEHPVENTQLQNEKLYLYYLQNGRDMYVDQELDINRLSDYDVDHIVPQSFLKDDSIDNKVLTRSDKNAGKSDNVPSEEVVKKMKNYWRQLLNAKLITQRKFDNLTKAERGGLSELDKAGFIKRQLVETRQITKHVAQILDSRMNTKYDENDKLIREVKVITLKSKLVSDFRKDFQFYKVREINNYHHAHDAYLNAVVGTALIKKYPKLESEFVYGDYKVYDVRKMIAKSEQEIGKATAKYFFYSNIMNFFKTEITLANGEIRKRPLIETNGETGEIVWDKGRDFATVRKVLSMPQVNIVKKTEVQTGGFSKESILPKRNSDKLIARKKDWDPKKYGGFDSPTVAYSVLVVAKVEKGKSKKLKSVKELLGITIMERSSFEKNPIDFLEAKGYKEVKKDLIIKLPKYSLFELENGRKRMLASAGELQKGNELALPSKYVNFLYLASHYEKLKGSPEDNEQKQLFVEQHKHYLDEIIEQISEFSKRVILADANLDKVLSAYNKHRDKPIREQAENIIHLFTLTNLGAPAAFKYFDTTIDRKRYTSTKEVLDATLIHQSITGLYETRIDLSQLGGD

SEQ ID NO: 41 - protein, 1367 aa, Streptococcus pyogenes
  misc_feature (839)..(839): Xaa can be any naturally occurring amino acid
DKKYSIGLDIGTNSVGWAVITDEYKVPSKKFKVLGNTDRHSIKKNLIGALLFDSGETAEATRLKRTARRRYTRRKNRICYLQEIFSNEMAKVDDSFFHRLEESFLVEEDKKHERHPIFGNIVDEVAYHEKYPTIYHLRKKLVDSTDKADLRLIYLALAHMIKFRGHFLIEGDLNPDNSDVDKLFIQLVQTYNQLFEENPINASGVDAKAILSARLSKSRRLENLIAQLPGEKKNGLFGNLIALSLGLTPNFKSNFDLAEDAKLQLSKDTYDDDLDNLLAQIGDQYADLFLAAKNLSDAILLSDILRVNTEITKAPLSASMIKRYDEHHQDLTLLKALVRQQLPEKYKEIFFDQSKNGYAGYIDGGASQEEFYKFIKPILEKMDGTEELLVKLNREDLLRKQRTFDNGSIPHQIHLGELHAILRRQEDFYPFLKDNREKIEKILTFRIPYYVGPLARGNSRFAWMTRKSEETITPWNFEEVVDKGASAQSFIERMTNFDKNLPNEKVLPKHSLLYEYFTVYNELTKVKYVTEGMRKPAFLSGEQKKAIVDLLFKTNRKVTVKQLKEDYFKKIECFDSVEISGVEDRFNASLGTYHDLLKIIKDKDFLDNEENEDILEDIVLTLTLFEDREMIEERLKTYAHLFDDKVMKQLKRRRYTGWGRLSRKLINGIRDKQSGKTILDFLKSDGFANRNFMQLIHDDSLTFKEDIQKAQVSGQGDSLHEHIANLAGSPAIKKGILQTVKVVDELVKVMGRHKPENIVIEMARENQTTQKGQKNSRERMKRIEEGIKELGSQILKEHPVENTQLQNEKLYLYYLQNGRDMYVDQELDINRLSDYDVDXIVPQSFLKDDSIDNKVLTRSDKNRGKSDNVPSEEVVKKMKNYWRQLLNAKLITQRKFDNLTKAERGGLSELDKAGFIKRQLVETRQITKHVAQILDSRMNTKYDENDKLIREVKVITLKSKLVSDFRKDFQFYKVREINNYHHAHDAYLNAVVGTALIKKYPKLESEFVYGDYKVYDVRKMIAKSEQEIGKATAKYFFYSNIMNFFKTEITLANGEIRKRPLIETNGETGEIVWDKGRDFATVRKVLSMPQVNIVKKTEVQTGGFSKESILPKRNSDKLIARKKDWDPKKYGGFDSPTVAYSVLVVAKVEKGKSKKLKSVKELLGITIMERSSFEKNPIDFLEAKGYKEVKKDLIIKLPKYSLFELENGRKRMLASAGELQKGNELALPSKYVNFLYLASHYEKLKGSPEDNEQKQLFVEQHKHYLDEIIEQISEFSKRVILADANLDKVLSAYNKHRDKPIREQAENIIHLFTLTNLGAPAAFKYFDTTIDRKRYTSTKEVLDATLIHQSITGLYETRIDLSQLGGD

SEQ ID NO: 42 - protein, 1367 aa, Streptococcus pyogenes
DKKYSIGLDIGTNSVGWAVITDEYKVPSKKFKVLGNTDRHSIKKNLIGALLFDSGETAEATRLKRTARRRYTRRKNRICYLQEIFSNEMAKVDDSFFHRLEESFLVEEDKKHERHPIFGNIVDEVAYHEKYPTIYHLRKKLVDSTDKADLRLIYLALAHMIKFRGHFLIEGDLNPDNSDVDKLFIQLVQTYNQLFEENPINASGVDAKAILSARLSKSRRLENLIAQLPGEKKNGLFGNLIALSLGLTPNFKSNFDLAEDAKLQLSKDTYDDDLDNLLAQIGDQYADLFLAAKNLSDAILLSDILRVNTEITKAPLSASMIKRYDEHHQDLTLLKALVRQQLPEKYKEIFFDQSKNGYAGYIDGGASQEEFYKFIKPILEKMDGTEELLVKLNREDLLRKQRTFDNGSIPHQIHLGELHAILRRQEDFYPFLKDNREKIEKILTFRIPYYVGPLARGNSRFAWMTRKSEETITPWNFEEVVDKGASAQSFIERMTNFDKNLPNEKVLPKHSLLYEYFTVYNELTKVKYVTEGMRKPAFLSGEQKKAIVDLLFKTNRKVTVKQLKEDYFKKIECFDSVEISGVEDRFNASLGTYHDLLKIIKDKDFLDNEENEDILEDIVLTLTLFEDREMIEERLKTYAHLFDDKVMKQLKRRRYTGWGRLSRKLINGIRDKQSGKTILDFLKSDGFANRNFMQLIHDDSLTFKEDIQKAQVSGQGDSLHEHIANLAGSPAIKKGILQTVKVVDELVKVMGRHKPENIVIEMARENQTTQKGQKNSRERMKRIEEGIKELGSQILKEHPVENTQLQNEKLYLYYLQNGRDMYVDQELDINRLSDYDVDAIVPQSFLKDDSIDNKVLTRSDKNRGKSDNVPSEEVVKKMKNYWRQLLNAKLITQRKFDNLTKAERGGLSELDKAGFIKRQLVETRQITKHVAQILDSRMNTKYDENDKLIREVKVITLKSKLVSDFRKDFQFYKVREINNYHHAHDAYLNAVVGTALIKKYPKLESEFVYGDYKVYDVRKMIAKSEQEIGKATAKYFFYSNIMNFFKTEITLANGEIRKRPLIETNGETGEIVWDKGRDFATVRKVLSMPQVNIVKKTEVQTGGFSKESILPKRNSDKLIARKKDWDPKKYGGFDSPTVAYSVLVVAKVEKGKSKKLKSVKELLGITIMERSSFEKNPIDFLEAKGYKEVKKDLIIKLPKYSLFELENGRKRMLASAGELQKGNELALPSKYVNFLYLASHYEKLKGSPEDNEQKQLFVEQHKHYLDEIIEQISEFSKRVILADANLDKVLSAYNKHRDKPIREQAENIIHLFTLTNLGAPAAFKYFDTTIDRKRYTSTKEVLDATLIHQSITGLYETRIDLSQLGGD

SEQ ID NO: 43 - protein, 1367 aa, Streptococcus pyogenes
  misc_feature (863)..(863): Xaa can be any naturally occurring amino acid
DKKYSIGLDIGTNSVGWAVITDEYKVPSKKFKVLGNTDRHSIKKNLIGALLFDSGETAEATRLKRTARRRYTRRKNRICYLQEIFSNEMAKVDDSFFHRLEESFLVEEDKKHERHPIFGNIVDEVAYHEKYPTIYHLRKKLVDSTDKADLRLIYLALAHMIKFRGHFLIEGDLNPDNSDVDKLFIQLVQTYNQLFEENPINASGVDAKAILSARLSKSRRLENLIAQLPGEKKNGLFGNLIALSLGLTPNFKSNFDLAEDAKLQLSKDTYDDDLDNLLAQIGDQYADLFLAAKNLSDAILLSDILRVNTEITKAPLSASMIKRYDEHHQDLTLLKALVRQQLPEKYKEIFFDQSKNGYAGYIDGGASQEEFYKFIKPILEKMDGTEELLVKLNREDLLRKQRTFDNGSIPHQIHLGELHAILRRQEDFYPFLKDNREKIEKILTFRIPYYVGPLARGNSRFAWMTRKSEETITPWNFEEVVDKGASAQSFIERMTNFDKNLPNEKVLPKHSLLYEYFTVYNELTKVKYVTEGMRKPAFLSGEQKKAIVDLLFKTNRKVTVKQLKEDYFKKIECFDSVEISGVEDRFNASLGTYHDLLKIIKDKDFLDNEENEDILEDIVLTLTLFEDREMIEERLKTYAHLFDDKVMKQLKRRRYTGWGRLSRKLINGIRDKQSGKTILDFLKSDGFANRNFMQLIHDDSLTFKEDIQKAQVSGQGDSLHEHIANLAGSPAIKKGILQTVKVVDELVKVMGRHKPENIVIEMARENQTTQKGQKNSRERMKRIEEGIKELGSQILKEHPVENTQLQNEKLYLYYLQNGRDMYVDQELDINRLSDYDVDHIVPQSFLKDDSIDNKVLTRSDKNXGKSDNVPSEEVVKKMKNYWRQLLNAKLITQRKFDNLTKAERGGLSELDKAGFIKRQLVETRQITKHVAQILDSRMNTKYDENDKLIREVKVITLKSKLVSDFRKDFQFYKVREINNYHHAHDAYLNAVVGTALIKKYPKLESEFVYGDYKVYDVRKMIAKSEQEIGKATAKYFFYSNIMNFFKTEITLANGEIRKRPLIETNGETGEIVWDKGRDFATVRKVLSMPQVNIVKKTEVQTGGFSKESILPKRNSDKLIARKKDWDPKKYGGFDSPTVAYSVLVVAKVEKGKSKKLKSVKELLGITIMERSSFEKNPIDFLEAKGYKEVKKDLIIKLPKYSLFELENGRKRMLASAGELQKGNELALPSKYVNFLYLASHYEKLKGSPEDNEQKQLFVEQHKHYLDEIIEQISEFSKRVILADANLDKVLSAYNKHRDKPIREQAENIIHLFTLTNLGAPAAFKYFDTTIDRKRYTSTKEVLDATLIHQSITGLYETRIDLSQLGGD

SEQ ID NO: 44 - protein, 1367 aa, Streptococcus pyogenes
DKKYSIGLDIGTNSVGWAVITDEYKVPSKKFKVLGNTDRHSIKKNLIGALLFDSGETAEATRLKRTARRRYTRRKNRICYLQEIFSNEMAKVDDSFFHRLEESFLVEEDKKHERHPIFGNIVDEVAYHEKYPTIYHLRKKLVDSTDKADLRLIYLALAHMIKFRGHFLIEGDLNPDNSDVDKLFIQLVQTYNQLFEENPINASGVDAKAILSARLSKSRRLENLIAQLPGEKKNGLFGNLIALSLGLTPNFKSNFDLAEDAKLQLSKDTYDDDLDNLLAQIGDQYADLFLAAKNLSDAILLSDILRVNTEITKAPLSASMIKRYDEHHQDLTLLKALVRQQLPEKYKEIFFDQSKNGYAGYIDGGASQEEFYKFIKPILEKMDGTEELLVKLNREDLLRKQRTFDNGSIPHQIHLGELHAILRRQEDFYPFLKDNREKIEKILTFRIPYYVGPLARGNSRFAWMTRKSEETITPWNFEEVVDKGASAQSFIERMTNFDKNLPNEKVLPKHSLLYEYFTVYNELTKVKYVTEGMRKPAFLSGEQKKAIVDLLFKTNRKVTVKQLKEDYFKKIECFDSVEISGVEDRFNASLGTYHDLLKIIKDKDFLDNEENEDILEDIVLTLTLFEDREMIEERLKTYAHLFDDKVMKQLKRRRYTGWGRLSRKLINGIRDKQSGKTILDFLKSDGFANRNFMQLIHDDSLTFKEDIQKAQVSGQGDSLHEHIANLAGSPAIKKGILQTVKVVDELVKVMGRHKPENIVIEMARENQTTQKGQKNSRERMKRIEEGIKELGSQILKEHPVENTQLQNEKLYLYYLQNGRDMYVDQELDINRLSDYDVDHIVPQSFLKDDSIDNKVLTRSDKNAGKSDNVPSEEVVKKMKNYWRQLLNAKLITQRKFDNLTKAERGGLSELDKAGFIKRQLVETRQITKHVAQILDSRMNTKYDENDKLIREVKVITLKSKLVSDFRKDFQFYKVREINNYHHAHDAYLNAVVGTALIKKYPKLESEFVYGDYKVYDVRKMIAKSEQEIGKATAKYFFYSNIMNFFKTEITLANGEIRKRPLIETNGETGEIVWDKGRDFATVRKVLSMPQVNIVKKTEVQTGGFSKESILPKRNSDKLIARKKDWDPKKYGGFDSPTVAYSVLVVAKVEKGKSKKLKSVKELLGITIMERSSFEKNPIDFLEAKGYKEVKKDLIIKLPKYSLFELENGRKRMLASAGELQKGNELALPSKYVNFLYLASHYEKLKGSPEDNEQKQLFVEQHKHYLDEIIEQISEFSKRVILADANLDKVLSAYNKHRDKPIREQAENIIHLFTLTNLGAPAAFKYFDTTIDRKRYTSTKEVLDATLIHQSITGLYETRIDLSQLGGD

SEQ ID NO: 45 - protein, 1053 aa, Staphylococcus aureus; identical to SEQ ID NO: 15

SEQ ID NO: 46 - protein, 1082 aa, Neisseria meningitidis
MAAFKPNSINYILGLDIGIASVGWAMVEIDEEENPIRLIDLGVRVFERAEVPKTGDSLAMARRLARSVRRLTRRRAHRLLRTRRLLKREGVLQAANFDENGLIKSLPNTPWQLRAAALDRKLTPLEWSAVLLHLIKHRGYLSQRKNEGETADKELGALLKGVAGNAHALQTGDFRTPAELALNKFEKESGHIRNQRSDYSHTFSRKDLQAELILLFEKQKEFGNPHVSGGLKEGIETLLMTQRPALSGDAVQKMLGHCTFEPAEPKAAKNTYTAERFIWLTKLNNLRILEQGSERPLTDTERATLMDEPYRKSKLTYAQARKLLGLEDTAFFKGLRYGKDNAEASTLMEMKAYHAISRALEKEGLKDKKSPLNLSPELQDEIGTAFSLFKTDEDITGRLKDRIQPEILEALLKHISFDKFVQISLKALRRIVPLMEQGKRYDEACAEIYGDHYGKKNTEEKIYLPPIPADEIRNPVVLRALSQARKVINGVVRRYGSPARIHIETAREVGKSFKDRKEIEKRQEENRKDREKAAAKFREYFPNFVGEPKSKDILKLRLYEQQHGKCLYSGKEINLGRLNEKGYVEIDAALPFSRTWDDSFNNKVLVLGSENQNKGNQTPYEYFNGKDNSREWQEFKARVETSRFPRSKKQRILLQKFDEDGFKERNLNDTRYVNRFLCQFVADRMRLTGKGKKRVFASNGQITNLLRGFWGLRKVRAENDRHHALDAVVVACSTVAMQQKITRFVRYKEMNAFDGKTIDKETGEVLHQKTHFPQPWEFFAQEVMIRVFGKPDGKPEFEEADTLEKLRTLLAEKLSSRPEAVHEYVTPLFVSRAPNRKMSGQGHMETVKSAKRLDEGVSVLRVPLTQLKLKDLEKMVNREREPKLYEALKARLEAHKDDPAKAFAEPFYKYDKAGNRTQQVKAVRVEQVQKTGVWVRNHNGIADNATMVRVDVFEKGDKYYLVPIYSWQVAKGILPDRAVVQGKDEEDWQLIDDSFNFKFSLHPNDLVEVITKKARMFGYFASCHRGTGNINIRIHDLDHKIGKNGILEGIGVKTALSFQKYQIDELGKEIRPCRLKKRPPVR

SEQ ID NO: 47 - protein, 984 aa, Campylobacter jejuni
MARILAFDIGISSIGWAFSENDELKDCGVRIFTKVENPKTGESLALPRRLARSARKRLARRKARLNHLKHLIANEFKLNYEDYQSFDESLAKAYKGSLISPYELRFRALNELLSKQDFARVILHIAKRRGYDDIKNSDDKEKGAILKAIKQNEEKLANYQSVGEYLYKEYFQKFKENSKEFTNVRNKKESYERCIAQSFLKDELKLIFKKQREFGFSFSKKFEEEVLSVAFYKRALKDFSHLVGNCSFFTDEKRAPKNSPLAFMFVALTRIINLLNNLKNTEGILYTKDDLNALLNEVLKNGTLTYKQTKKLLGLSDDYEFKGEKGTYFIEFKKYKEFIKALGEHNLSQDDLNEIAKDITLIKDEIKLKKALAKYDLNQNQIDSLSKLEFKDHLNISFKALKLVTPLMLEGKKYDEACNELNLKVAINEDKKDFLPAFNETYYKDEVTNPVVLRAIKEYRKVLNALLKKYGKVHKINIELAREVGKNHSQRAKIEKEQNENYKAKKDAELECEKLGLKINSKNILKLRLFKEQKEFCAYSGEKIKISDLQDEKMLEIDHIYPYSRSFDDSYMNKVLVFTKQNQEKLNQTPFEAFGNDSAKWQKIEVLAKNLPTKKQKRILDKNYKDKEQKNFKDRNLNDTRYIARLVLNYTKDYLDFLPLSDDENTKLNDTQKGSKVHVEAKSGMLTSALRHTWGFSAKDRNNHLHHAIDAVIIAYANNSIVKAFSDFKKEQESNSAELYAKKISELDYKNKRKFFEPFSGFRQKVLDKIDEIFVSKPERKKPSGALHEETFRKEEEFYQSYGGKEGVLKALELGKIRKVNGKIVKNGDMFRVDIFKHKKTNKFYAVPIYTMDFALKVLPNKAVARSKKGEIKDWILMDENYEFCFSLYKDSLILIQTKDMQEPEFVYYNAFTSSTVSLIVSKHDNKFETLSKNQKILFKNANEKEVIAKSIGIQNLKVFEKYIVSALGEVTKAEFRQREDFKK

SEQ ID NO: 48 - protein, 1087 aa, Geobacillus stearothermophilus
MRYKIGLDIGITSVGWAVMNLDIPRIEDLGVRIFDRAENPQTGESLALPRRLARSARRRLRRRKHRLERIRRLVIREGILTKEELDKLFEEKHEIDVWQLRVEALDRKLNNDELARVLLHLAKRRGFKSNRKSERSNKENSTMLKHIEENRAILSSYRTVGEMIVKDPKFALHKRNKGENYTNTIARDDLEREIRLIFSKQREFGNMSCTEEFENEYITIWASQRPVASKDDIEKKVGFCTFEPKEKRAPKATYTFQSFIAWEHINKLRLISPSGARGLTDEERRLLYEQAFQKNKITYHDIRTLLHLPDDTYFKGIVYDRGESRKQNENIRFLELDAYHQIRKAVDKVYGKGKSSSFLPIDFDTFGYALTLFKDDADIHSYLRNEYEQNGKRMPNLANKVYDNELIEELLNLSFTKFGHLSLKALRSILPYMEQGEVYSSACERAGYTFTGPKKKQKTMLLPNIPPIANPVVMRALTQARKVVNAIIKKYGSPVSIHIELARDLSQTFDERRKTKKEQDENRKKNETAIRQLMEYGLTLNPTGHDIVKFKLWSEQNGRCAYSLQPIEIERLLEPGYVEVDHVIPYSRSLDDSYTNKVLVLTRENREKGNRIPAEYLGVGTERWQQFETFVLTNKQFSKKKRDRLLRLHYDENEETEFKNRNLNDTRYISRFFANFIREHLKFAESDDKQKVYTVNGRVTAHLRSRWEFNKNREESDLHHAVDAVIVACTTPSDIAKVTAFYQRREQNKELAKKTEPHFPQPWPHFADELRARLSKHPKESIKALNLGNYDDQKLESLQPVFVSRMPKRSVTGAAHQETLRRYVGIDERSGKIQTVVKTKLSEIKLDASGHFPMYGKESDPRTYEAIRQRLLEHNNDPKKAFQEPLYKPKKNGEPGPVIRTVKIIDTKNQVIPLNDGKTVAYNSNIVRVDVFEKDGKYYCVPVYTMDIMKGILPNKAIEPNKPYSEWKEMTEDYTFRFSLYPNDLIRIELPREKTVKTAAGEEINVKDVFVYYKTIDSANGGLELISHDHRFSLRGVGSRTLKRFEKYQVDVLGNIYKVRGEKRVGLASSAHSKPGKTIRPLQSTRD

SEQ ID NO: 49 - protein, 1228 aa, Unknown
  Lachnospiraceae bacterium
MSKLEKFTNCYSLSKTLRFKAIPVGKTQENIDNKRLLVEDEKRAEDYKGVKKLLDRYYLSFINDVLHSIKLKNLNNYISLFRKKTRTEKENKELENLEINLRKEIAKAFKGNEGYKSLFKKDIIETILPEFLDDKDEIALVNSFNGFTTAFTGFFDNRENMFSEEAKSTSIAFRCINENLTRYISNMDIFEKVDAIFDKHEVQEIKEKILNSDYDVEDFFEGEFFNFVLTQEGIDVYNAIIGGFVTESGEKIKGLNEYINLYNQKTKQKLPKFKPLYKQVLSDRESLSFYGEGYTSDEEVLEVFRNTLNKNSEIFSSIKKLEKLFKNFDEYSSAGIFVKNGPAISTISKDIFGEWNVIRDKWNAEYDDIHLKKKAVVTEKYEDDRRKSFKKIGSFSLEQLQEYADADLSVVEKLKEIIIQKVDEIYKVYGSSEKLFDADFVLEKSLKKNDAVVAIMKDLLDSVKSFENYIKAFFGEGKETNRDESFYGDFVLAYDILLKVDHIYDAIRNYVTQKPYSKDKFKLYFQNPQFMGGWDKDKETDYRATILRYGSKYYLAIMDKKYAKCLQKIDKDDVNGNYEKINYKLLPGPNKMLPKVFFSKKWMAYYNPSEDIQKIYKNGTFKKGDMFNLNDCHKLIDFFKDSISRYPKWSNAYDFNFSETEKYKDIAGFYREVEEQGYKVSFESASKKEVDKLVEEGKLYMFQIYNKDFSDKSHGTPNLHTMYFKLLFDENNHGQIRLSGGAELFMRRASLKKEELVVHPANSPIANKNPDNPKKTTTLSYDVYKDKRFSEDQYELHIPIAINKCPKNIFKINTEVRVLLKHDDNPYVIGIDRGERNLLYIVVVDGKGNIVEQYSLNEIINNFNGIRIKTDYHSLLDKKEKERFEARQNWTSIENIKELKAGYISQVVHKICELVEKYDAVIALEDLNSGFKNSRVKVEKQVYQKFEKMLIDKLNYMVDKKSNPCATGGALKGYQITNKFESFKSMSTQNGFIFYIPAWLTSKIDPSTGFVNLLKTKYTSIADSKKFISSFDRIMYVPEEDLFEFALDYKNFSRTDADYIKKWKLYSYGNRIRIFRNPKKNNVFDWEEVCLTSAYKELFNKYGINYQQGDIRALLCEQSDKAFYSSFMALMSLMLQMRNSITGRTDVDFLISPVKNSDGIFYDSRNYEAQENAILPKNADANGAYNIARKVLWAIGQFKKAEDEKLDKVKIAISNKEWLEYAQTSVKH

SEQ ID NO: 50 - protein, 1108 aa, Bacillus hisashii
MATRSFILKIEPNEEVKKGLWKTHEVLNHGIAYYMNILKLIRQEAIYEHHEQDPKNPKKVSKAEIQAELWDFVLKMQKCNSFTHEVDKDEVFNILRELYEELVPSSVEKKGEANQLSNKFLYPLVDPNSQSGKGTASSGRKPRWYNLKIAGDPSWEEEKKKWEEDKKKDPLAKILGKLAEYGLIPLFIPYTDSNEPIVKEIKWMEKSRNQSVRRLDKDMFIQALERFLSWESWNLKVKEEYEKVEKEYKTLEERIKEDIQALKALEQYEKERQEQLLRDTLNTNEYRLSKRGLRGWREIIQKWLKMDENEPSEKYLEVFKDYQRKHPREAGDYSVYEFLSKKENHFIWRNHPEYPYLYATFCEIDKKKKDAKQQATFTLADPINHPLWVRFEERSGSNLNKYRILTEQLHTEKLKKKLTVQLDRLIYPTESGGWEEKGKVDIVLLPSRQFYNQIFLDIEEKGKHAFTYKDESIKFPLKGTLGGARVQFDRDHLRRYPHKVESGNVGRIYFNMTVNIEPTESPVSKSLKIHRDDFPKVVNFKPKELTEWIKDSKGKKLKSGIESLEIGLRVMSIDLGQRQAAAASIFEVVDQKPDIEGKLFFPIKGTELYAVHRASFNIKLPGETLVKSREVLRKAREDNLKLMNQKLNFLRNVLHFQQFEDITEREKRVTKWISRQENSDVPLVYQDELIQIRELMYKPYKDWVAFLKQLHKRLEVEIGKEVKHWRKSLSDGRKGLYGISLKNIDEIDRTRKFLLRWSLRPTEPGEVRRLEPGQRFAIDQLNHLNALKEDRLKKMANTIIMHALGYCYDVRKKKWQAKNPACQIILFEDLSNYNPYEERSRFENSKLMKWSRREIPRQVALQGEIYGLQVGEVGAQFSSRFHAKTGSPGIRCSVVTKEKLQDNRFFKNLQREGRLTLDKIAVLKEGDLYPDKGGEKFISLSKDRKCVTTHADINAAQNLQKRFWTRTHGFYKVYCKAYQVDGQTVYIPESKDQKQKIIEEFGEGYFILKDGVYEWVNAGKLKIKKGSSKQSSSELVDSDILKDSFDLASELKGEKLMLYRDPSGNVFPSDKWMAAGVFFGKLERILISKLTNQYSISTIEDDSSKQSM

SEQ ID NO: 51 - protein, 1307 aa, Acidaminococcus sp
MTQFEGFTNLYQVSKTLRFELIPQGKTLKHIQEQGFIEEDKARNDHYKELKPIIDRIYKTYADQCLQLVQLDWENLSAAIDSYRKEKTEETRNALIEEQATYRNAIHDYFIGRTDNLTDAINKRHAEIYKGLFKAELFNGKVLKQLGTVTTTEHENALLRSFDKFTTYFSGFYENRKNVFSAEDISTAIPHRIVQDNFPKFKENCHIFTRLITAVPSLREHFENVKKAIGIFVSTSIEEVFSFPFYNQLLTQTQIDLYNQLLGGISREAGTEKIKGLNEVLNLAIQKNDETAHIIASLPHRFIPLFKQILSDRNTLSFILEEFKSDEEVIQSFCKYKTLLRNENVLETAEALFNELNSIDLTHIFISHKKLETISSALCDHWDTLRNALYERRISELTGKITKSAKEKVQRSLKHEDINLQEIISAAGKELSEAFKQKTSEILSHAHAALDQPLPTTLKKQEEKEILKSQLDSLLGLYHLLDWFAVDESNEVDPEFSARLTGIKLEMEPSLSFYNKARNYATKKPYSVEKFKLNFQMPTLASGWDVNKEKNNGAILFVKNGLYYLGIMPKQKGRYKALSFEPTEKTSEGFDKMYYDYFPDAAKMIPKCSTQLKAVTAHFQTHTTPILLSNNFIEPLEITKEIYDLNNPEKEPKKFQTAYAKKTGDQKGYREALCKWIDFTRDFLSKYTKTTSIDLSSLRPSSQYKDLGEYYAELNPLLYHISFQRIAEKEIMDAVETGKLYLFQIYNKDFAKGHHGKPNLHTLYWTGLFSPENLAKTSIKLNGQAELFYRPKSRMKRMAHRLGEKMLNKKLKDQKTPIPDTLYQELYDYVNHRLSHDLSDEARALLPNVITKEVSHEIIKDRRFTSDKFFFHVPITLNYQAANSPSKFNQRVNAYLKEHPETPIIGIDRGERNLIYITVIDSTGKILEQRSLNTIQQFDYQKKLDNREKERVAARQAWSVVGTIKDLKQGYLSQVIHEIVDLMIHYQAVVVLENLNFGFKSKRTGIAEKAVYQQFEKMLIDKLNCLVLKDYPAEKVGGVLNPYQLTDQFTSFAKMGTQSGFLFYVPAPYTSKIDPLTGFVDPFVWKTIKNHESRKHFLEGFDFLHYDVKTGDFILHFKMNRNLSFQRGLPGFMPAWDIVFEKNETQFDAKGTPFIAGKRIVPVIENHRFTGRYRDLYPANELIALLEEKGIVFRDGSNILPKLLENDDSHAIDTMVALIRSVLQMRNSNAATGEDYINSPVRDLNGVCFDSRFQNPEWPMDADANGAYHIALKGQLLLNHLKESKDLKLQNGISNQDWLAYIQELRN

SEQ ID NO: 52 - protein, 1307 aa, Artificial Sequence
  Synthetic
MTQFEGFTNLYQVSKTLRFELIPQGKTLKHIQEQGFIEEDKARNDHYKELKPIIDRIYKTYADQCLQLVQLDWENLSAAIDSYRKEKTEETRNALIEEQATYRNAIHDYFIGRTDNLTDAINKRHAEIYKGLFKAELFNGKVLKQLGTVTTTEHENALLRSFDKFTTYFSGFYENRKNVFSAEDISTAIPHRIVQDNFPKFKENCHIFTRLITAVPSLREHFENVKKAIGIFVSTSIEEVFSFPFYNQLLTQTQIDLYNQLLGGISREAGTEKIKGLNEVLNLAIQKNDETAHIIASLPHRFIPLFKQILSDRNTLSFILEEFKSDEEVIQSFCKYKTLLRNENVLETAEALFNELNSIDLTHIFISHKKLETISSALCDHWDTLRNALYERRISELTGKITKSAKEKVQRSLKHEDINLQEIISAAGKELSEAFKQKTSEILSHAHAALDQPLPTTLKKQEEKEILKSQLDSLLGLYHLLDWFAVDESNEVDPEFSARLTGIKLEMEPSLSFYNKARNYATKKPYSVEKFKLNFQMPTLASGWDVNKEKNNGAILFVKNGLYYLGIMPKQKGRYKALSFEPTEKTSEGFDKMYYDYFPDAAKMIPKCSTQLKAVTAHFQTHTTPILLSNNFIEPLEITKEIYDLNNPEKEPKKFQTAYAKKTGDQKGYREALCKWIDFTRDFLSKYTKTTSIDLSSLRPSSQYKDLGEYYAELNPLLYHISFQRIAEKEIMDAVETGKLYLFQIYNKDFAKGHHGKPNLHTLYWTGLFSPENLAKTSIKLNGQAELFYRPKSRMKRMAHRLGEKMLNKKLKDQKTPIPDTLYQELYDYVNHRLSHDLSDEARALLPNVITKEVSHEIIKDRRFTSDKFFFHVPITLNYQAANSPSKFNQRVNAYLKEHPETPIIGIDRGERNLIYITVIDSTGKILEQRSLNTIQQFDYQKKLDNREKERVAARQAWSVVGTIKDLKQGYLSQVIHEIVDLMIHYQAVVVLENLNFGFKSKRTGIAEKAVYQQFEKMLIDKLNCLVLKDYPAEKVGGVLNPYQLTDQFTSFAKMGTQSGFLFYVPAPYTSKIDPLTGFVDPFVWKTIKNHESRKHFLEGFDFLHYDVKTGDFILHFKMNRNLSFQRGLPGFMPAWDIVFEKNETQFDAKGTPFIAGKRIVPVIENHRFTGRYRDLYPANELIALLEEKGIVFRDGSNILPKLLENDDSHAIDTMVALIRSVLQMANSNAATGEDYINSPVRDLNGVCFDSRFQNPEWPMDADANGAYHIALKGQLLLNHLKESKDLKLQNGISNQDWLAYIQELRN

SEQ ID NO: 53 - protein, 1259 aa, Unknown
  Lachnospiraceae bacterium
MNYKTGLEDFIGKESLSKTLRNALIPTESTKIHMEEMGVIRDDELRAEKQQELKEIMDDYYRTFIEEKLGQIQGIQWNSLFQKMEETMEDISVRKDLDKIQNEKRKEICCYFTSDKRFKDLFNAKLITDILPNFIKDNKEYTEEEKAEKEQTRVLFQRFATAFTNYFNQRRNNFSEDNISTAISFRIVNENSEIHLQNMRAFQRIEQQYPEEVCGMEEEYKDMLQEWQMKHIYSVDFYDRELTQPGIEYYNGICGKINEHMNQFCQKNRINKNDFRMKKLHKQILCKKSSYYEIPFRFESDQEVYDALNEFIKTMKKKEIIRRCVHLGQECDDYDLGKIYISSNKYEQISNALYGSWDTIRKCIKEEYMDALPGKGEKKEEKAEAAAKKEEYRSIADIDKIISLYGSEMDRTISAKKCITEICDMAGQISIDPLVCNSDIKLLQNKEKTTEIKTILDSFLHVYQWGQTFIVSDIIEKDSYFYSELEDVLEDFEGITTLYNHVRSYVTQKPYSTVKFKLHFGSPTLANGWSQSKEYDNNAILLMRDQKFYLGIFNVRNKPDKQIIKGHEKEEKGDYKKMIYNLLPGPSKMLPKVFITSRSGQETYKPSKHILDGYNEKRHIKSSPKFDLGYCWDLIDYYKECIHKHPDWKNYDFHFSDTKDYEDISGFYREVEMQGYQIKWTYISADEIQKLDEKGQIFLFQIYNKDFSVHSTGKDNLHTMYLKNLFSEENLKDIVLKLNGEAELFFRKASIKTPIVHKKGSVLVNRSYTQTVGNKEIRVSIPEEYYTEIYNYLNHIGKGKLSSEAQRYLDEGKIKSFTATKDIVKNYRYCCDHYFLHLPITINFKAKSDVAVNERTLAYIAKKEDIHIIGIDRGERNLLYISVVDVHGNIREQRSFNIVNGYDYQQKLKDREKSRDAARKNWEEIEKIKELKEGYLSMVIHYIAQLVVKYNAVVAMEDLNYGFKTGRFKVERQVYQKFETMLIEKLHYLVFKDREVCEEGGVLRGYQLTYIPESLKKVGKQCGFIFYVPAGYTSKIDPTTGFVNLFSFKNLTNRESRQDFVGKFDEIRYDRDKKMFEFSFDYNNYIKKGTILASTKWKVYTNGTRLKRIVVNGKYTSQSMEVELTDAMEKMLQRAGIEYHDGKDLKGQIVEKGIEAEIIDIFRLTVQMRNSRSESEDREYDRLISPVLNDKGEFFDTATADKTLPQDADANGAYCIALKGLYEVKQIKENWKENEQFPRNKLVQDNKTWFDFMQKKRYL

SEQ ID NO: 54 - protein, 1306 aa, Prevotella copri
MAKNFEDFKRLYSLSKTLRFEAKPIGATLDNIVKSGLLDEDEHRAASYVKVKKLIDEYHKVFIDRVLDDGCLPLENKGNNNSLAEYYESYVSRAQDEDAKKKFKEIQQNLRSVIAKKLTEDKAYANLFGNKLIESYKDKEDKKKIIDSDLIQFINTAESTQLDSMSQDEAKELVKEFWGFVTYFYGFFDNRKNMYTAEEKSTGIAYRLVNENLPKFIDNIEAFNRAITRPEIQENMGVLYSDFSEYLNVESIQEMFQLDYYNMLLTQKQIDVYNAIIGGKTDDEHDVKIKGINEYINLYNQQHKDDKLPKLKALFKQILSDRNAISWLPEEFNSDQEVLNAIKDCYERLAENVLGDKVLKSLLGSLADYSLDGIFIRNDLQLTDISQKMFGNWGVIQNAIMQNIKRVAPARKHKESEEDYEKRIAGIFKKADSFSISYINDCLNEADPNNAYFVENYFATFGAVNTPTMQRENLFALVQNAYTEVAALLHSDYPTVKHLAQDKANVSKIKALLDAIKSLQHFVKPLLGKGDESDKDERFYGELASLWAELDTVTPLYNMIRNYMTRKPYSQKKIKLNFENPQLLGGWDANKEKDYATIILRRNGLYYLAIMDKDSRKLLGKAMPSDGECYEKMVYKFFKDVTTMIPKCSTQLKDVQAYFKVNTDDYVLNSKAFNKPLTITKEVFDLNNVLYGKYKKFQKGYLTATGDNVGYTHAVNVWIKFCMDFLNSYDSTCIYDFSSLKPESYLSLDAFYQDANLLLYKLSFARASVSYINQLVEEGKMYLFQIYNKDFSEYSKGTPNMHTLYWKALFDERNLADVVYKLNGQAEMFYRKKSIENTHPTHPANHPILNKNKDNKKKESLFDYDLIKDRRYTVDKFMFHVPITMNFKSVGSENINQDVKAYLRHADDMHIIGIDRGERHLLYLVVIDLQGNIKEQYSLNEIVNEYNGNTYHTNYHDLLDVREEERLKARQSWQTIENIKELKEGYLSQVIHKITQLMVRYHAIVVLEDLSKGFMRSRQKVEKQVYQKFEKMLIDKLNYLVDKKTDVSTPGGLLNAYQLTCKSDSSQKLGKQSGFLFYIPAWNTSKIDPVTGFVNLLDTHSLNSKEKIKAFFSKFDAIRYNKDKKWFEFNLDYDKFGKKAEDTRTKWTLCTRGMRIDTFRNKEKNSQWDNQEVDLTTEMKSLLEHYYIDIHGNLKDAISAQTDKAFFTGLLHILKLTLQMRNSITGTETDYLVSPVADENGIFYDSRSCGNQLPENADANGAYNIARKGLMLIEQIKNAEDLNNVKFDISNKAWLNFAQQKPYKNG

SEQ ID NO: 55 - protein, 1142 aa, Eubacterium rectale
MFSAKLISDILPEFVIHNNNYSASEKEEKTQVIKLFSRFATSFKDYFKNRANCFSANDISSSSCHRIVNDNAEIFFSNALVYRRIVKNLSNDDINKISGDMKDSLKEMSLEEIYSYEKYGEFITQEGISFYNDICGKVNLFMNLYCQKNKENKNLYKLRKLHKQILCIADTSYEVPYKFESDEEVYQSVNGFLDNISSKHIVERLRKIGENYNGYNLDKIYIVSKFYESVSQKTYRDWETINTALEIHYNNILPGNGKSKADKVKKAVKNDLQKSITEINELVSNYKLCPDDNIKAETYIHEISHILNNFEAQELKYNPEIHLVESELKASELKNVLDVIMNAFHWCSVFMTEELVDKDNNFYAELEEIYDEIYPVISLYNLVRNYVTQKPYSTKKIKLNFGIPTLADGWSKSKEYSNNAIILMRDNLYYLGIFNAKNKPDKKIIEGNTSENKGDYKKMIYNLLPGPNKMIPKVFLSSKTGVETYKPSAYILEGYKQNKHLKSSKDFDITFCHDLIDYFKNCIAIHPEWKNFGFDFSDTSTYEDISGFYREVELQGYKIDWTYISEKDIDLLQEKGQLYLFQIYNKDFSKKSSGNDNLHTMYLKNLFSEENLKDIVLKLNGEAEIFFRKSSIKNPIIHKKGSILVNRTYEAEEKDQFGNIQIVRKTIPENIYQELYKYFNDKSDKELSDEAAKLKNVVGHHEAATNIVKDYRYTYDKYFLHMPITINFKANKTSFINDRILQYIAKEKDLHVIGIDRGERNLIYVSVIDTCGNIVEQKSFNIVNGYDYQIKLKQQEGARQIARKEWKEIGKIKEIKEGYLSLVIHEISKMVIKYNAIIAMEDLSYGFKKGRFKVERQVYQKFETMLINKLNYLVFKDISITENGGLLKGYQLTYIPDKLKNVGHQCGCIFYVPAAYTSKIDPTTGFVNIFKFKDLTVDAKREFIKKFDSIRYDSDKNLFCFTFDYNNFITQNTVMSKSSWSVYTYGVRIKRRFVNGRFSNESDTIDITKDMEKTLEMTDINWRDGHDLRQDIIDYEIVQHIFEIFKLTVQMRNSLSELEDRDYDRLISPVLNENNIFYDSAKAGDALPKDADANGAYCIALKGLYEIKQITENWKEDGKFSRDKLKISNKDWFDFIQNKRYL

SEQ ID NO: 56 - protein, 1259 aa, Unknown
  Lachnospiraceae bacterium
MNYKTGLEDFIGKESLSKTLRNALIPTESTKIHMEEMGVIRDDELRAEKQQELKEIMDDYYRAFIEEKLGQIQGIQWNSLFQKMEETMEDISVRKDLDKIQNEKRKEICCYFTSDKRFKDLFNAKLITDILPNFIKDNKEYTEEEKAEKEQTRVLFQRFATAFTNYFNQRRNNFSEDNISTAISFRIVNENSEIHLQNMRAFQRIEQQYPEEVCGMEEEYKDMLQEWQMKHIYLVDFYDRVLTQPGIEYYNGICGKINEHMNQFCQKNRINKNDFRMKKLHKQILCKKSSYYEIPFRFESDQEVYDALNEFIKTMKEKEIICRCVHLGQKCDDYDLGKIYISSNKYEQISNALYGSWDTIRKCIKEEYMDALPGKGEKKEEKAEAAAKKEEYRSIADIDKIISLYGSEMDRTISAKKCITEICDMAGQISTDPLVCNSDIKLLQNKEKTTEIKTILDSFLHVYQWGQTFIVSDIIEKDSYFYSELEDVLEDFEGITTLYNHVRSYVTQKPYSTVKFKLHFGSPTLANGWSQSKEYDNNAILLMRDQKFYLGIFNVRNKPDKQIIKGHEKEEKGDYKKMIYNLLPGPSKMLPKVFITSRSGQETYKPSKHILDGYNEKRHIKSSPKFDLGYCWDLIDYYKECIHKHPDWKNYDFHFSDTKDYEDISGFYREVEMQGYQIKWTYISADEIQKLDEKGQIFLFQIYNKDFSVHSTGKDNLHTMYLKNLFSEENLKDIVLKLNGEAELFFRKASIKTPVVHKKGSVLVNRSYTQTVGDKEIRVSIPEEYYTEIYNYLNHIGRGKLSTEAQRYLEERKIKSFTATKDIVKNYRYCCDHYFLHLPITINFKAKSDIAVNERTLAYIAKKEDIHIIGIDRGERNLLYISVVDVHGNIREQRSFNIVNGYDYQQKLKDREKSRDAARKNWEEIEKIKELKEGYLSMVIHYIAQLVVKYNAVVAMEDLNYGFKTGRFKVERQVYQKFETMLIEKLHYLVFKDREVCEEGGVLRGYQLTYIPESLKKVGKQCGFIFYVPAGYTSKIDPTTGFVNLFSFKNLTNRESRQDFVGKFDEIRYDRDKKMFEFSFDYNNYIKKGTMLASTKWKVYTNGTRLKRIVVNGKYTSQSMEVELTDAMEKMLQRAGIEYHDGKDLKGQIVEKGIEAEIIDIFRLTVQMRNSRSESEDREYDRLISPVLNDKGEFFDTATADKTLPQDADANGAYCIALKGLYEVKQIKENWKENEQFPRNKLVQDNKTWFDFMQKKRYL

SEQ ID NO: 57 - protein, 1108 aa, Bacillus hisashii; identical to SEQ ID NO: 50

SEQ ID NO: 58 - protein, 1465 aa, Thermomonas hydrothermalis
MSEKTTQRAYTLRLNRASGECAVCQNNSCDCWHDALWATHKAVNRGAKAFGDWLLTLRGGLCHTLVEMEVPAKGNNPPQRPTDQERRDRRVLLALSWLSVEDEHGAPKEFIVATGRDSADDRAKKVEEKLREILEKRDFQEHEIDAWLQDCGPSLKAHIREDAVWVNRRALFDAAVERIKTLTWEEAWDFLEPFFGTQYFAGIGDGKDKDDAEGPARQGEKAKDLVQKAGQWLSARFGIGTGADFMSMAEAYEKIAKWASQAQNGDNGKATIEKLACALRPSEPPTLDTVLKCISGPGHKSATREYLKTLDKKSTVTQEDLNQLRKLADEDARNCRKKVGKKGKKPWADEVLKDVENSCELTYLQDNSPARHREFSVMLDHAARRVSMAHSWIKKAEQRRRQFESDAQKLKNLQERAPSAVEWLDRFCESRSMTTGANTGSGYRIRKRAIEGWSYVVQAWAEASCDTEDKRIAAARKVQADPEIEKFGDIQLFEALAADEAICVWRDQEGTQNPSILIDYVTGKTAEHNQKRFKVPAYRHPDELRHPVFCDFGNSRWSIQFAIHKEIRDRDKGAKQDTRQLQNRHGLKMRLWNGRSMTDVNLHWSSKRLTADLALDQNPNPNPTEVTRADRLGRAASSAFDHVKIKNVFNEKEWNGRLQAPRAELDRIAKLEEQGKTEQAEKLRKRLRWYVSFSPCLSPSGPFIVYAGQHNIQPKRSGQYAPHAQANKGRARLAQLILSRLPDLRILSVDLGHRFAAACAVWETLSSDAFRREIQGLNVLAGGSGEGDLFLHVEMTGDDGKRRTVVYRRIGPDQLLDNTPHPAPWARLDRQFLIKLQGEDEGVREASNEELWTVHKLEVEVGRTVPLIDRMVRSGFGKTEKQKERLKKLRELGWISAMPNEPSAETDEKEGEIRSISRSVDELMSSALGTLRLALKRHGNRARIAFAMTADYKPMPGGQKYYFHEAKEASKNDDETKRRDNQIEFLQDALSLWHDLFSSPDWEDNEAKKLWQNHIATLPNYQTPEEISAELKRVERNKKRKENRDKLRTAAKALAENDQLRQHLHDTWKERWESDDQQWKERLRSLKDWIFPRGKAEDNPSIRHVGGLSITRINTISGLYQILKAFKMRPEPDDLRKNIPQKGDDELENFNRRLLEARDRLREQRVKQLASRIIEAALGVGRIKIPKNGKLPKRPRTTVDTPCHAVVIESLKTYRPDDLRTRRENRQLMQWSSAKVRKYLKEGCELYGLHFLEVPANYTSRQCSRTGLPGIRCDDVPTGDFLKAPWWRRAINTAREKNGGDAKDRFLVDLYDHLNNLQSKGEALPATVRVPRQGGNLFIAGAQLDDTNKERRAIQADLNAAANIGLRALLDPDWRGRWWYVPCKDGTSEPALDRIEGSTAFNDVRSLPTGDNSSRRAPREIENLWRDPSGDSLESGTWSPTRAYWDTVQSRVIELLRRHAGLPTS

SEQ ID NO: 59 - protein, 1090 aa, Laceyella sacchari
MSIRSFKLKLKTKSGVNAEQLRRGLWRTHQLINDGIAYYMNWLVLLRQEDLFIRNKETNEIEKRSKEEIQAVLLERVHKQQQRNQWSGEVDEQTLLQALRQLYEEIVPSVIGKSGNASLKARFFLGPLVDPNNKTTKDVSKSGPTPKWKKMKDAGDPNWVQEYEKYMAERQTLVRLEEMGLIPLFPMYTDEVGDIHWLPQASGYTRTWDRDMFQQAIERLLSWESWNRRVRERRAQFEKKTHDFASRFSESDVQWMNKLREYEAQQEKSLEENAFAPNEPYALTKKALRGWERVYHSWMRLDSAASEEAYWQEVATCQTAMRGEFGDPAIYQFLAQKENHDIWRGYPERVIDFAELNHLQRELRRAKEDATFTLPDSVDHPLWVRYEAPGGTNIHGYDLVQDTKRNLTLILDKFILPDENGSWHEVKKVPFSLAKSKQFHRQVWLQEEQKQKKREVVFYDYSTNLPHLGTLAGAKLQWDRNFLNKRTQQQIEETGEIGKVFFNISVDVRPAVEVKNGRLQNGLGKALTVLTHPDGTKIVTGWKAEQLEKWVGESGRVSSLGLDSLSEGLRVMSIDLGQRTSATVSVFEITKEAPDNPYKFFYQLEGTEMFAVHQRSFLLALPGENPPQKIKQMREIRWKERNRIKQQVDQLSAILRLHKKVNEDERIQAIDKLLQKVASWQLNEEIATAWNQALSQLYSKAKENDLQWNQAIKNAHHQLEPVVGKQISLWRKDLSTGRQGIAGLSLWSIEELEATKKLLTRWSKRSREPGVVKRIERFETFAKQIQHHINQVKENRLKQLANLIVMTALGYKYDQEQKKWIEVYPACQVVLFENLRSYRFSFERSRRENKKLMEWSHRSIPKLVQMQGELFGLQVADVYAAYSSRYHGRTGAPGIRCHALTEADLRNETNIIHELIEAGFIKEEHRPYLQQGDLVPWSGGELFATLQKPYDNPRILTLHADINAAQNIQKRFWHPSMWFRVNCESVMEGEIVTYVPKNKTVHKKQGKTFRFVKVEGSDVYEWAKWSKNRNKNTFSSITERKPPSSMILFRDPSGTFFKEQEWVEQKTFWGKVQSMIQAYMKKTIVQRMEE

SEQ ID NO: 60 - protein, 1194 aa, Dsulfonatronum thiodismutans
MVLGRKDDTAELRRALWTTHEHVNLAVAEVERVLLRCRGRSYWTLDRRGDPVHVPESQVAEDALAMAREAQRRNGWPVVGEDEEILLALRYLYEQIVPSCLLDDLGKPLKGDAQKIGTNYAGPLFDSDTCRRDEGKDVACCGPFHEVAGKYLGALPEWATPISKQEFDGKDASHLRFKATGGDDAFFRVSIEKANAWYEDPANQDALKNKAYNKDDWKKEKDKGISSWAVKYIQKQLQLGQDPRTEVRRKLWLELGLLPLFIPVFDKTMVGNLWNRLAVRLALAHLLSWESWNHRAVQDQALARAKRDELAALFLGMEDGFAGLREYELRRNESIKQHAFEPVDRPYVVSGRALRSWTRVREEWLRHGDTQESRKNICNRLQDRLRGKFGDPDVFHWLAEDGQEALWKERDCVTSFSLLNDADGLLEKRKGYALMTFADARLHPRWAMYEAPGGSNLRTYQIRKTENGLWADVVLLSPRNESAAVEEKTFNVRLAPSGQLSNVSFDQIQKGSKMVGRCRYQSANQQFEGLLGGAEILFDRKRIANEQHGATDLASKPGHVWFKLTLDVRPQAPQGWLDGKGRPALPPEAKHFKTALSNKSKFADQVRPGLRVLSVDLGVRSFAACSVFELVRGGPDQGTYFPAADGRTVDDPEKLWAKHERSFKITLPGENPSRKEEIARRAAMEELRSLNGDIRRLKAILRLSVLQEDDPRTEHLRLFMEAIVDDPAKSALNAELFKGFGDDRFRSTPDLWKQHCHFFHDKAEKVVAERFSRWRTETRPKSSSWQDWRERRGYAGGKSYWAVTYLEAVRGLILRWNMRGRTYGEVNRQDKKQFGTVASALLHHINQLKEDRIKTGADMIIQAARGFVPRKNGAGWVQVHEPCRLILFEDLARYRFRTDRSRRENSRLMRWSHREIVNEVGMQGELYGLHVDTTEAGFSSRYLASSGAPGVRCRHLVEEDFHDGLPGMHLVGELDWLLPKDKDRTANEARRLLGGMVRPGMLVPWDGGELFATLNAASQLHVIHADINAAQNLQRRFWGRCGEAIRIVCNQLSVDGSTRYEMAKAPKARLLGALQQLKNGDAPFHLTSIPNSQKPENSYVMTPTNAGKKYRAGPGEKSSGEEDELALDIVEQAEELAQGRKTFFRDPSGVFFAPDRWLPSEIYWSRIRRRIWQVTLERNSSGRQERAEMDEMPY

SEQ ID NO: 61 - protein, 1300 aa, Francisella novicida
MSIYQEFVNKYSLSKTLRFELIPQGKTLENIKARGLILDDEKRAKDYKKAKQIIDKYHQFFIEEILSSVCISEDLLQNYSDVYFKLKKSDDDNLQKDFKSAKDTIKKQISEYIKDSEKFKNLFNQNLIDAKKGQESDLILWLKQSKDNGIELFKANSDITDIDEALEIIKSFKGWTTYFKGFHENRKNVYSSNDIPTSIIYRIVDDNLPKFLENKAKYESLKDKAPEAINYEQIKKDLAEELTFDIDYKTSEVNQRVFSLDEVFEIANFNNYLNQSGITKFNTIIGGKFVNGENTKRKGINEYINLYSQQINDKTLKKYKMSVLFKQILSDTESKSFVIDKLEDDSDVVTTMQSFYEQIAAFKTVEEKSIKETLSLLFDDLKAQKLDLSKIYFKNDKSLTDLSQQVFDDYSVIGTAVLEYITQQIAPKNLDNPSKKEQELIAKKTEKAKYLSLETIKLALEEFNKHRDIDKQCRFEEILANFAAIPMIFDEIAQNKDNLAQISIKYQNQGKKDLLQASAEDDVKAIKDLLDQTNNLLHKLKIFHISQSEDKANILDKDEHFYLVFEECYFELANIVPLYNKIRNYITQKPYSDEKFKLNFENSTLANGWDKNKEPDNTAILFIKDDKYYLGVMNKKNNKIFDDKAIKENKGEGYKKIVYKLLPGANKMLPKVFFSAKSIKFYNPSEDILRIRNHSTHTKNGSPQKGYEKFEFNIEDCRKFIDFYKQSISKHPEWKDFGFRFSDTQRYNSIDEFYREVENQGYKLTFENISESYIDSVVNQGKLYLFQIYNKDFSAYSKGRPNLHTLYWKALFDERNLQDVVYKLNGEAELFYRKQSIPKKITHPAKEAIANKNKDNPKKESVFEYDLIKDKRFTEDKFFFHCPITINFKSSGANKFNDEINLLLKEKANDVHILSIDRGERHLAYYTLVDGKGNIIKQDTFNIIGNDRMKTNYHDKLAAIEKDRDSARKDWKKINNIKEMKEGYLSQVVHEIAKLVIEYNAIVVFEDLNFGFKRGRFKVEKQVYQKLEKMLIEKLNYLVFKDNEFDKTGGVLRAYQLTAPFETFKKMGKQTGIIYYVPAGFTSKICPVTGFVNQLYPKYESVSKSQEFFSKFDKICYNLDKGYFEFSFDYKNFGDKAAKGKWTIASFGSRLINFRNSDKNHNWDTREVYPTKELEKLLKDYSIEYGHGECIKAAICGESDKKFFAKLTSVLNTILQMRNSKTGTELDYLISPVADVNGNFFDSRQAPKNMPQDADANGAYHIGLKGLMLLGRIKNNQEGKKLNLVIKNEEYFEFVQNRNN

SEQ ID NO: 62 - protein, 1082 aa, Geobacillus thermodenitrificans; identical to SEQ ID NO: 25

SEQ ID NO: 63 - protein, 887 aa, Natronobacterium gregoryi
MTVIDLDSTTTADELTSGHTYDISVTLTGVYDNTDEQHPRMSLAFEQDNGERRYITLWKNTTPKDVFTYDYATGSTYIFTNIDYEVKDGYENLTATYQTTVENATAQEVGTTDEDETFAGGEPLDHHLDDALNETPDDAETESDSGHVMTSFASRDQLPEWTLHTYTLTATDGAKTDTEYARRTLAYTVRQELYTDHDAAPVATDGLMLLTPEPLGETPLDLDCGVRVEADETRTLDYTTAKDRLLARELVEEGLKRSLWDDYLVRGIDEVLSKEPVLTCDEFDLHERYDLSVEVGHSGRAYLHINFRHRFVPKLTLADIDDDNIYPGLRVKTTYRPRRGHIVWGLRDECATDSLNTLGNQSVVAYHRNNQTPINTDLLDAIEAADRRVVETRRQGHGDDAVSFPQELLAVEPNTHQIKQFASDGFHQQARSKTRLSASRCSEKAQAFAERLDPVRLNGSTVEFSSEFFTGNNEQQLRLLYENGESVLTFRDGARGAHPDETFSKGIVNPPESFEVAVVLPEQQADTCKAQWDTMADLLNQAGAPPTRSETVQYDAFSSPESISLNVAGAIDPSEVDAAFVVLPPDQEGFADLASPTETYDELKKALANMGIYSQMAYFDRFRDAKIFYTRNVALGLLAAAGGVAFTTEHAMPGDADMFIGIDVSRSYPEDGASGQINIAATATAVYKDGTILGHSSTRPQLGEKLQSTDVRDIMKNAILGYQQVTGESPTHIVIHRDGFMNEDLDPATEFLNEQGVEYDIVEIRKQPQTRLLAVSDVQYDTPVKSIAAINQNEPRATVATFGAPEYLATRDGGGLPRPIQIERVAGETDIETLTRQVYLLSQSHIQVHNSTARLPITTAYADQASTHATKGYLVQTGAFESNVGFL

SEQ ID NO: 64 - protein, 1387 aa, Artificial Sequence
  Synthetic
DYKVYDVRKMIAKSEQEIGKATAKYFFYSNIMNFFKTEITLANGEIRKRPLIETNGETGEIVWDKGRDFATVRKVLSMPQVNIVKKTEVQTGGFSKESILPKRNSDKLIARKKDWDPKKYGGFDSPTVAYSVLVVAKVEKGKSKKLKSVKELLGITIMERSSFEKNPIDFLEAKGYKEVKKDLIIKLPKYSLFELENGRKRMLASAGELQKGNELALPSKYVNFLYLASHYEKLKGSPEDNEQKQLFVEQHKHYLDEIIEQISEFSKRVILADANLDKVLSAYNKHRDKPIREQAENIIHLFTLTNLGAPAAFKYFDTTIDRKRYTSTKEVLDATLIHQSITGLYETRIDLSQLGGDGGSGGSGGSGGSGGSGGSGGDKKYSIGLAIGTNSVGWAVITDEYKVPSKKFKVLGNTDRHSIKKNLIGALLFDSGETAEATRLKRTARRRYTRRKNRICYLQEIFSNEMAKVDDSFFHRLEESFLVEEDKKHERHPIFGNIVDEVAYHEKYPTIYHLRKKLVDSTDKADLRLIYLALAHMIKFRGHFLIEGDLNPDNSDVDKLFIQLVQTYNQLFEENPINASGVDAKAILSARLSKSRRLENLIAQLPGEKKNGLFGNLIALSLGLTPNFKSNFDLAEDAKLQLSKDTYDDDLDNLLAQIGDQYADLFLAAKNLSDAILLSDILRVNTEITKAPLSASMIKRYDEHHQDLTLLKALVRQQLPEKYKEIFFDQSKNGYAGYIDGGASQEEFYKFIKPILEKMDGTEELLVKLNREDLLRKQRTFDNGSIPHQIHLGELHAILRRQEDFYPFLKDNREKIEKILTFRIPYYVGPLARGNSRFAWMTRKSEETITPWNFEEVVDKGASAQSFIERMTNFDKNLPNEKVLPKHSLLYEYFTVYNELTKVKYVTEGMRKPAFLSGEQKKAIVDLLFKTNRKVTVKQLKEDYFKKIECFDSVEISGVEDRFNASLGTYHDLLKIIKDKDFLDNEENEDILEDIVLTLTLFEDREMIEERLKTYAHLFDDKVMKQLKRRRYTGWGRLSRKLINGIRDKQSGKTILDFLKSDGFANRNFMQLIHDDSLTFKEDIQKAQVSGQGDSLHEHIANLAGSPAIKKGILQTVKVVDELVKVMGRHKPENIVIEMARENQTTQKGQKNSRERMKRIEEGIKELGSQILKEHPVENTQLQNEKLYLYYLQNGRDMYVDQELDINRLSDYDVDHIVPQSFLKDDSIDNKVLTRSDKNRGKSDNVPSEEVVKKMKNYWRQLLNAKLITQRKFDNLTKAERGGLSELDKAGFIKRQLVETRQITKHVAQILDSRMNTKYDENDKLIREVKVITLKSKLVSDFRKDFQFYKVREINNYHHAHDAYLNAVVGTALIKKYPKLESEFVYG

SEQ ID NO: 65 - protein, 1388 aa, Artificial Sequence
  Synthetic
EIGKATAKYFFYSNIMNFFKTEITLANGEIRKRPLIETNGETGEIVWDKGRDFATVRKVLSMPQVNIVKKTEVQTGGFSKESILPKRNSDKLIARKKDWDPKKYGGFDSPTVAYSVLVVAKVEKGKSKKLKSVKELLGITIMERSSFEKNPIDFLEAKGYKEVKKDLIIKLPKYSLFELENGRKRMLASAGELQKGNELALPSKYVNFLYLASHYEKLKGSPEDNEQKQLFVEQHKHYLDEIIEQISEFSKRVILADANLDKVLSAYNKHRDKPIREQAENIIHLFTLTNLGAPAAFKYFDTTIDRKRYTSTKEVLDATLIHQSITGLYETRIDLSQLGGDGGSGGSGGSGGSGGSGGSGGMDKKYSIGLAIGTNSVGWAVITDEYKVPSKKFKVLGNTDRHSIKKNLIGALLFDSGETAEATRLKRTARRRYTRRKNRICYLQEIFSNEMAKVDDSFFHRLEESFLVEEDKKHERHPIFGNIVDEVAYHEKYPTIYHLRKKLVDSTDKADLRLIYLALAHMIKFRGHFLIEGDLNPDNSDVDKLFIQLVQTYNQLFEENPINASGVDAKAILSARLSKSRRLENLIAQLPGEKKNGLFGNLIALSLGLTPNFKSNFDLAEDAKLQLSKDTYDDDLDNLLAQIGDQYADLFLAAKNLSDAILLSDILRVNTEITKAPLSASMIKRYDEHHQDLTLLKALVRQQLPEKYKEIFFDQSKNGYAGYIDGGASQEEFYKFIKPILEKMDGTEELLVKLNREDLLRKQRTFDNGSIPHQIHLGELHAILRRQEDFYPFLKDNREKIEKILTFRIPYYVGPLARGNSRFAWMTRKSEETITPWNFEEVVDKGASAQSFIERMTNFDKNLPNEKVLPKHSLLYEYFTVYNELTKVKYVTEGMRKPAFLSGEQKKAIVDLLFKTNRKVTVKQLKEDYFKKIECFDSVEISGVEDRFNASLGTYHDLLKIIKDKDFLDNEENEDILEDIVLTLTLFEDREMIEERLKTYAHLFDDKVMKQLKRRRYTGWGRLSRKLINGIRDKQSGKTILDFLKSDGFANRNFMQLIHDDSLTFKEDIQKAQVSGQGDSLHEHIANLAGSPAIKKGILQTVKVVDELVKVMGRHKPENIVIEMARENQTTQKGQKNSRERMKRIEEGIKELGSQILKEHPVENTQLQNEKLYLYYLQNGRDMYVDQELDINRLSDYDVDHIVPQSFLKDDSIDNKVLTRSDKNRGKSDNVPSEEVVKKMKNYWRQLLNAKLITQRKFDNLTKAERGGLSELDKAGFIKRQLVETRQITKHVAQILDSRMNTKYDENDKLIREVKVITLKSKLVSDFRKDFQFYKVREINNYHHAHDAYLNAVVGTALIKKYPKLESEFVYGDYKVYDVRKMIAKSEQ

SEQ ID NO: 66 - protein, 1387 aa, Artificial Sequence
  Synthetic
NIMNFFKTEITLANGEIRKRPLIETNGETGEIVWDKGRDFATVRKVLSMPQVNIVKKTEVQTGGFSKESILPKRNSDKLIARKKDWDPKKYGGFDSPTVAYSVLVVAKVEKGKSKKLKSVKELLGITIMERSSFEKNPIDFLEAKGYKEVKKDLIIKLPKYSLFELENGRKRMLASAGELQKGNELALPSKYVNFLYLASHYEKLKGSPEDNEQKQLFVEQHKHYLDEIIEQISEFSKRVILADANLDKVLSAYNKHRDKPIREQAENIIHLFTLTNLGAPAAFKYFDTTIDRKRYTSTKEVLDATLIHQSITGLYETRIDLSQLGGDGGSGGSGGSGGSGGSGGSGGDKKYSIGLAIGTNSVGWAVITDEYKVPSKKFKVLGNTDRHSIKKNLIGALLFDSGETAEATRLKRTARRRYTRRKNRICYLQEIFSNEMAKVDDSFFHRLEESFLVEEDKKHERHPIFGNIVDEVAYHEKYPTIYHLRKKLVDSTDKADLRLIYLALAHMIKFRGHFLIEGDLNPDNSDVDKLFIQLVQTYNQLFEENPINASGVDAKAILSARLSKSRRLENLIAQLPGEKKNGLFGNLIALSLGLTPNFKSNFDLAEDAKLQLSKDTYDDDLDNLLAQIGDQYADLFLAAKNLSDAILLSDILRVNTEITKAPLSASMIKRYDEHHQDLTLLKALVRQQLPEKYKEIFFDQSKNGYAGYIDGGASQEEFYKFIKPILEKMDGTEELLVKLNREDLLRKQRTFDNGSIPHQIHLGELHAILRRQEDFYPFLKDNREKIEKILTFRIPYYVGPLARGNSRFAWMTRKSEETITPWNFEEVVDKGASAQSFIERMTNFDKNLPNEKVLPKHSLLYEYFTVYNELTKVKYVTEGMRKPAFLSGEQKKAIVDLLFKTNRKVTVKQLKEDYFKKIECFDSVEISGVEDRFNASLGTYHDLLKIIKDKDFLDNEENEDILEDIVLTLTLFEDREMIEERLKTYAHLFDDKVMKQLKRRRYTGWGRLSRKLINGIRDKQSGKTILDFLKSDGFANRNFMQLIHDDSLTFKEDIQKAQVSGQGDSLHEHIANLAGSPAIKKGILQTVKVVDELVKVMGRHKPENIVIEMARENQTTQKGQKNSRERMKRIEEGIKELGSQILKEHPVENTQLQNEKLYLYYLQNGRDMYVDQELDINRLSDYDVDHIVPQSFLKDDSIDNKVLTRSDKNRGKSDNVPSEEVVKKMKNYWRQLLNAKLITQRKFDNLTKAERGGLSELDKAGFIKRQLVETRQITKHVAQILDSRMNTKYDENDKLIREVKVITLKSKLVSDFRKDFQFYKVREINNYHHAHDAYLNAVVGTALIKKYPKLESEFVYGDYKVYDVRKMIAKSEQEIGKATAKYFFYS

SEQ ID NO: 67 - protein, 1388 aa, Artificial Sequence
  Synthetic
PEDNEQKQLFVEQHKHYLDEIIEQISEFSKRVILADANLDKVLSAYNKHRDKPIREQAENIIHLFTLTNLGAPAAFKYFDTTIDRKRYTSTKEVLDATLIHQSITGLYETRIDLSQLGGDGGSGGSGGSGGSGGSGGSGGMDKKYSIGLAIGTNSVGWAVITDEYKVPSKKFKVLGNTDRHSIKKNLIGALLFDSGETAEATRLKRTARRRYTRRKNRICYLQEIFSNEMAKVDDSFFHRLEESFLVEEDKKHERHPIFGNIVDEVAYHEKYPTIYHLRKKLVDSTDKADLRLIYLALAHMIKFRGHFLIEGDLNPDNSDVDKLFIQLVQTYNQLFEENPINASGVDAKAILSARLSKSRRLENLIAQLPGEKKNGLFGNLIALSLGLTPNFKSNFDLAEDAKLQLSKDTYDDDLDNLLAQIGDQYADLFLAAKNLSDAILLSDILRVNTEITKAPLSASMIKRYDEHHQDLTLLKALVRQQLPEKYKEIFFDQSKNGYAGYIDGGASQEEFYKFIKPILEKMDGTEELLVKLNREDLLRKQRTFDNGSIPHQIHLGELHAILRRQEDFYPFLKDNREKIEKILTFRIPYYVGPLARGNSRFAWMTRKSEETITPWNFEEVVDKGASAQSFIERMTNFDKNLPNEKVLPKHSLLYEYFTVYNELTKVKYVTEGMRKPAFLSGEQKKAIVDLLFKTNRKVTVKQLKEDYFKKIECFDSVEISGVEDRFNASLGTYHDLLKIIKDKDFLDNEENEDILEDIVLTLTLFEDREMIEERLKTYAHLFDDKVMKQLKRRRYTGWGRLSRKLINGIRDKQSGKTILDFLKSDGFANRNFMQLIHDDSLTFKEDIQKAQVSGQGDSLHEHIANLAGSPAIKKGILQTVKVVDELVKVMGRHKPENIVIEMARENQTTQKGQKNSRERMKRIEEGIKELGSQILKEHPVENTQLQNEKLYLYYLQNGRDMYVDQELDINRLSDYDVDHIVPQSFLKDDSIDNKVLTRSDKNRGKSDNVPSEEVVKKMKNYWRQLLNAKLITQRKFDNLTKAERGGLSELDKAGFIKRQLVETRQITKHVAQILDSRMNTKYDENDKLIREVKVITLKSKLVSDFRKDFQFYKVREINNYHHAHDAYLNAVVGTALIKKYPKLESEFVYGDYKVYDVRKMIAKSEQEIGKATAKYFFYSNIMNFFKTEITLANGEIRKRPLIETNGETGEIVWDKGRDFATVRKVLSMPQVNIVKKTEVQTGGFSKESILPKRNSDKLIARKKDWDPKKYGGFDSPTVAYSVLVVAKVEKGKSKKLKSVKELLGITIMERSSFEKNPIDFLEAKGYKEVKKDLIIKLPKYSLFELENGRKRMLASAGELQKGNELALPSKYVNFLYLASHYEKLKGS

SEQ ID NO: 68 - protein, 1387 aa, Artificial Sequence
  Synthetic
KPIREQAENIIHLFTLTNLGAPAAFKYFDTTIDRKRYTSTKEVLDATLIHQSITGLYETRIDLSQLGGDGGSGGSGGSGGSGGSGGSGGDKKYSIGLAIGTNSVGWAVITDEYKVPSKKFKVLGNTDRHSIKKNLIGALLFDSGETAEATRLKRTARRRYTRRKNRICYLQEIFSNEMAKVDDSFFHRLEESFLVEEDKKHERHPIFGNIVDEVAYHEKYPTIYHLRKKLVDSTDKADLRLIYLALAHMIKFRGHFLIEGDLNPDNSDVDKLFIQLVQTYNQLFEENPINASGVDAKAILSARLSKSRRLENLIAQLPGEKKNGLFGNLIALSLGLTPNFKSNFDLAEDAKLQLSKDTYDDDLDNLLAQIGDQYADLFLAAKNLSDAILLSDILRVNTEITKAPLSASMIKRYDEHHQDLTLLKALVRQQLPEKYKEIFFDQSKNGYAGYIDGGASQEEFYKFIKPILEKMDGTEELLVKLNREDLLRKQRTFDNGSIPHQIHLGELHAILRRQEDFYPFLKDNREKIEKILTFRIPYYVGPLARGNSRFAWMTRKSEETITPWNFEEVVDKGASAQSFIERMTNFDKNLPNEKVLPKHSLLYEYFTVYNELTKVKYVTEGMRKPAFLSGEQKKAIVDLLFKTNRKVTVKQLKEDYFKKIECFDSVEISGVEDRFNASLGTYHDLLKIIKDKDFLDNEENEDILEDIVLTLTLFEDREMIEERLKTYAHLFDDKVMKQLKRRRYTGWGRLSRKLINGIRDKQSGKTILDFLKSDGFANRNFMQLIHDDSLTFKEDIQKAQVSGQGDSLHEHIANLAGSPAIKKGILQTVKVVDELVKVMGRHKPENIVIEMARENQTTQKGQKNSRERMKRIEEGIKELGSQILKEHPVENTQLQNEKLYLYYLQNGRDMYVDQELDINRLSDYDVDHIVPQSFLKDDSIDNKVLTRSDKNRGKSDNVPSEEVVKKMKNYWRQLLNAKLITQRKFDNLTKAERGGLSELDKAGFIKRQLVETRQITKHVAQILDSRMNTKYDENDKLIREVKVITLKSKLVSDFRKDFQFYKVREINNYHHAHDAYLNAVVGTALIKKYPKLESEFVYGDYKVYDVRKMIAKSEQEIGKATAKYFFYSNIMNFFKTEITLANGEIRKRPLIETNGETGEIVWDKGRDFATVRKVLSMPQVNIVKKTEVQTGGFSKESILPKRNSDKLIARKKDWDPKKYGGFDSPTVAYSVLVVAKVEKGKSKKLKSVKELLGITIMERSSFEKNPIDFLEAKGYKEVKKDLIIKLPKYSLFELENGRKRMLASAGELQKGNELALPSKYVNFLYLASHYEKLKGSPEDNEQKQLFVEQHKHYLDEIIEQISEFSKRVILADANLDKVLSAYNKHRD

SEQ ID NO: 69 - protein, 357 aa, Artificial Sequence
  Synthetic
DYKVYDVRKMIAKSEQEIGKATAKYFFYSNIMNFFKTEITLANGEIRKRPLIETNGETGEIVWDKGRDFATVRKVLSMPQVNIVKKTEVQTGGFSKESILPKRNSDKLIARKKDWDPKKYGGFDSPTVAYSVLVVAKVEKGKSKKLKSVKELLGITIMERSSFEKNPIDFLEAKGYKEVKKDLIIKLPKYSLFELENGRKRMLASAGELQKGNELALPSKYVNFLYLASHYEKLKGSPEDNEQKQLFVEQHKHYLDEIIEQISEFSKRVILADANLDKVLSAYNKHRDKPIREQAENIIHLFTLTNLGAPAAFKYFDTTIDRKRYTSTKEVLDATLIHQSITGLYETRIDLSQLGGD

SEQ ID NO: 70 - protein, 341 aa, Artificial Sequence
  Synthetic
EIGKATAKYFFYSNIMNFFKTEITLANGEIRKRPLIETNGETGEIVWDKGRDFATVRKVLSMPQVNIVKKTEVQTGGFSKESILPKRNSDKLIARKKDWDPKKYGGFDSPTVAYSVLVVAKVEKGKSKKLKSVKELLGITIMERSSFEKNPIDFLEAKGYKEVKKDLIIKLPKYSLFELENGRKRMLASAGELQKGNELALPSKYVNFLYLASHYEKLKGSPEDNEQKQLFVEQHKHYLDEIIEQISEFSKRVILADANLDKVLSAYNKHRDKPIREQAENIIHLFTLTNLGAPAAFKYFDTTIDRKRYTSTKEVLDATLIHQSITGLYETRIDLSQLGGD

SEQ ID NO: 71 - protein, 328 aa, Artificial Sequence
  Synthetic
NIMNFFKTEITLANGEIRKRPLIETNGETGEIVWDKGRDFATVRKVLSMPQVNIVKKTEVQTGGFSKESILPKRNSDKLIARKKDWDPKKYGGFDSPTVAYSVLVVAKVEKGKSKKLKSVKELLGITIMERSSFEKNPIDFLEAKGYKEVKKDLIIKLPKYSLFELENGRKRMLASAGELQKGNELALPSKYVNFLYLASHYEKLKGSPEDNEQKQLFVEQHKHYLDEIIEQISEFSKRVILADANLDKVLSAYNKHRDKPIREQAENIIHLFTLTNLGAPAAFKYFDTTIDRKRYTSTKEVLDATLIHQSITGLYETRIDLSQLGGD

SEQ ID NO: 72 - protein, 120 aa, Artificial Sequence
  Synthetic
PEDNEQKQLFVEQHKHYLDEIIEQISEFSKRVILADANLDKVLSAYNKHRDKPIREQAENIIHLFTLTNLGAPAAFKYFDTTIDRKRYTSTKEVLDATLIHQSITGLYETRIDLSQLGGD

SEQ ID NO: 73 - protein, 69 aa, Artificial Sequence
  Synthetic
KPIREQAENIIHLFTLTNLGAPAAFKYFDTTIDRKRYTSTKEVLDATLIHQSITGLYETRIDLSQLGGD

SEQ ID NO: 74 - protein, 1367 aa, Artificial Sequence
  Synthetic
DKKYSIGLDIGTNSVGWAVITDEYKVPSKKFKVLGNTDRHSIKKNLIGALLFDSGETAEATRLKRTARRRYTRRKNRICYLQEIFSNEMAKVDDSFFHRLEESFLVEEDKKHERHPIFGNIVDEVAYHEKYPTIYHLRKKLVDSTDKADLRLIYLALAHMIKFRGHFLIEGDLNPDNSDVDKLFIQLVQTYNQLFEENPINASGVDAKAILSARLSKSRRLENLIAQLPGEKKNGLFGNLIALSLGLTPNFKSNFDLAEDAKLQLSKDTYDDDLDNLLAQIGDQYADLFLAAKNLSDAILLSDILRVNTEITKAPLSASMIKRYDEHHQDLTLLKALVRQQLPEKYKEIFFDQSKNGYAGYIDGGASQEEFYKFIKPILEKMDGTEELLVKLNREDLLRKQRTFDNGSIPHQIHLGELHAILRRQEDFYPFLKDNREKIEKILTFRIPYYVGPLARGNSRFAWMTRKSEETITPWNFEEVVDKGASAQSFIERMTNFDKNLPNEKVLPKHSLLYEYFTVYNELTKVKYVTEGMRKPAFLSGEQKKAIVDLLFKTNRKVTVKQLKEDYFKKIECFDSVEISGVEDRFNASLGTYHDLLKIIKDKDFLDNEENEDILEDIVLTLTLFEDREMIEERLKTYAHLFDDKVMKQLKRRRYTGWGRLSRKLINGIRDKQSGKTILDFLKSDGFANRNFMQLIHDDSLTFKEDIQKAQVSGQGDSLHEHIANLAGSPAIKKGILQTVKVVDELVKVMGRHKPENIVIEMARENQTTQKGQKNSRERMKRIEEGIKELGSQILKEHPVENTQLQNEKLYLYYLQNGRDMYVDQELDINRLSDYDVDAIVPQSFLKDDSIDNKVLTRSDKNRGKSDNVPSEEVVKKMKNYWRQLLNAKLITQRKFDNLTKAERGGLSELDKAGFIKRQLVETRQITKHVAQILDSRMNTKYDENDKLIREVKVITLKSKLVSDFRKDFQFYKVREINNYHHAHDAYLNAVVGTALIKKYPKLESEFVYGDYKVYDVRKMIAKSEQEIGKATAKYFFYSNIMNFFKTEITLANGEIRKRPLIETNGETGEIVWDKGRDFATVRKVLSMPQVNIVKKTEVQTGGFSKESILPKRNSDKLIARKKDWDPKKYGGFVSPTVAYSVLVVAKVEKGKSKKLKSVKELLGITIMERSSFEKNPIDFLEAKGYKEVKKDLIIKLPKYSLFELENGRKRMLASARELQKGNELALPSKYVNFLYLASHYEKLKGSPEDNEQKQLFVEQHKHYLDEIIEQISEFSKRVILADANLDKVLSAYNKHRDKPIREQAENIIHLFTLTNLGAPAAFKYFDTTIDRKQYRSTKEVLDATLIHQSITGLYETRIDLSQLGGD

SEQ ID NO: 75 - protein, 1367 aa, Artificial Sequence
  Synthetic
DKKYSIGLDIGTNSVGWAVITDEYKVPSKKFKVLGNTDRHSIKKNLIGALLFDSGETAEATRLKRTARRRYTRRKNRICYLQEIFSNEMAKVDDSFFHRLEESFLVEEDKKHERHPIFGNIVDEVAYHEKYPTIYHLRKKLVDSTDKADLRLIYLALAHMIKFRGHFLIEGDLNPDNSDVDKLFIQLVQTYNQLFEENPINASGVDAKAILSARLSKSRRLENLIAQLPGEKKNGLFGNLIALSLGLTPNFKSNFDLAEDAKLQLSKDTYDDDLDNLLAQIGDQYADLFLAAKNLSDAILLSDILRVNTEITKAPLSASMIKRYDEHHQDLTLLKALVRQQLPEKYKEIFFDQSKNGYAGYIDGGASQEEFYKFIKPILEKMDGTEELLVKLNREDLLRKQRTFDNGSIPHQIHLGELHAILRRQEDFYPFLKDNREKIEKILTFRIPYYVGPLARGNSRFAWMTRKSEETITPWNFEEVVDKGASAQSFIERMTNFDKNLPNEKVLPKHSLLYEYFTVYNELTKVKYVTEGMRKPAFLSGEQKKAIVDLLFKTNRKVTVKQLKEDYFKKIECFDSVEISGVEDRFNASLGTYHDLLKIIKDKDFLDNEENEDILEDIVLTLTLFEDREMIEERLKTYAHLFDDKVMKQLKRRRYTGWGRLSRKLINGIRDKQSGKTILDFLKSDGFANRNFMQLIHDDSLTFKEDIQKAQVSGQGDSLHEHIANLAGSPAIKKGILQTVKVVDELVKVMGRHKPENIVIEMARENQTTQKGQKNSRERMKRIEEGIKELGSQILKEHPVENTQLQNEKLYLYYLQNGRDMYVDQELDINRLSDYDVDAIVPQSFLKDDSIDNKVLTRSDKNRGKSDNVPSEEVVKKMKNYWRQLLNAKLITQRKFDNLTKAERGGLSELDKAGFIKRQLVETRQITKHVAQILDSRMNTKYDENDKLIREVKVITLKSKLVSDFRKDFQFYKVREINNYHHAHDAYLNAVVGTALIKKYPKLESEFVYGDYKVYDVRKMIAKSEQEIGKATAKYFFYSNIMNFFKTEITLANGEIRKRPLIETNGETGEIVWDKGRDFATVRKVLSMPQVNIVKKTEVQTGGFSKESILPKRNSDKLIARKKDWDPKKYGGFVSPTVAYSVLVVAKVEKGKSKKLKSVKELLGITIMERSSFEKNPIDFLEAKGYKEVKKDLIIKLPKYSLFELENGRKRMLASAGELQKGNELALPSKYVNFLYLASHYEKLKGSPEDNEQKQLFVEQHKHYLDEIIEQISEFSKRVILADANLDKVLSAYNKHRDKPIREQAENIIHLFTLTNLGAPAAFKYFDTTIDRKQYRSTKEVLDATLIHQSITGLYETRIDLSQLGGD

SEQ ID NO: 76 - protein, 1367 aa, Artificial Sequence
  Synthetic
DKKYSIGLDIGTNSVGWAVITDEYKVPSKKFKVLGNTDRHSIKKNLIGALLFDSGETAEATRLKRTARRRYTRRKNRICYLQEIFSNEMAKVDDSFFHRLEESFLVEEDKKHERHPIFGNIVDEVAYHEKYPTIYHLRKKLVDSTDKADLRLIYLALAHMIKFRGHFLIEGDLNPDNSDVDKLFIQLVQTYNQLFEENPINASGVDAKAILSARLSKSRRLENLIAQLPGEKKNGLFGNLIALSLGLTPNFKSNFDLAEDAKLQLSKDTYDDDLDNLLAQIGDQYADLFLAAKNLSDAILLSDILRVNTEITKAPLSASMIKRYDEHHQDLTLLKALVRQQLPEKYKEIFFDQSKNGYAGYIDGGASQEEFYKFIKPILEKMDGTEELLVKLNREDLLRKQRTFDNGSIPHQIHLGELHAILRRQEDFYPFLKDNREKIEKILTFRIPYYVGPLARGNSRFAWMTRKSEETITPWNFEEVVDKGASAQSFIERMTNFDKNLPNEKVLPKHSLLYEYFTVYNELTKVKYVTEGMRKPAFLSGEQKKAIVDLLFKTNRKVTVKQLKEDYFKKIECFDSVEISGVEDRFNASLGTYHDLLKIIKDKDFLDNEENEDILEDIVLTLTLFEDREMIEERLKTYAHLFDDKVMKQLKRRRYTGWGRLSRKLINGIRDKQSGKTILDFLKSDGFANRNFMQLIHDDSLTFKEDIQKAQVSGQGDSLHEHIANLAGSPAIKKGILQTVKVVDELVKVMGRHKPENIVIEMARENQTTQKGQKNSRERMKRIEEGIKELGSQILKEHPVENTQLQNEKLYLYYLQNGRDMYVDQELDINRLSDYDVDAIVPQSFLKDDSIDNKVLTRSDKNRGKSDNVPSEEVVKKMKNYWRQLLNAKLITQRKFDNLTKAERGGLSELDKAGFIKRQLVETRQITKHVAQILDSRMNTKYDENDKLIREVKVITLKSKLVSDFRKDFQFYKVREINNYHHAHDAYLNAVVGTALIKKYPKLESEFVYGDYKVYDVRKMIAKSEQEIGKATAKYFFYSNIMNFFKTEITLANGEIRKRPLIETNGETGEIVWDKGRDFATVRKVLSMPQVNIVKKTEVQTGGFSKESILPKRNSDKLIARKKDWDPKKYGGFVSPTVAYSVLVVAKVEKGKSKKLKSVKELLGITIMERSSFEKNPIDFLEAKGYKEVKKDLIIKLPKYSLFELENGRKRMLASARELQKGNELALPSKYVNFLYLASHYEKLKGSPEDNEQKQLFVEQHKHYLDEIIEQISEFSKRVILADANLDKVLSAYNKHRDKPIREQAENIIHLFTLTNLGAPAAFKYFDTTIDRKEYRSTKEVLDATLIHQSITGLYETRIDLSQLGGD

SEQ ID NO: 77 - protein, 1368 aa, Artificial Sequence
  Synthetic
MDKKYSIGLDIGTNSVGWAVITDEYKVPSKKFKVLGNTDRHSIKKNLIGALLFDSGETAEATRLKRTARRRYTRRKNRICYLQEIFSNEMAKVDDSFFHRLEESFLVEEDKKHERHPIFGNIVDEVAYHEKYPTIYHLRKKLVDSTDKADLRLIYLALAHMIKFRGHFLIEGDLNPDNSDVDKLFIQLVQTYNQLFEENPINASGVDAKAILSARLSKSRRLENLIAQLPGEKKNGLFGNLIALSLGLTPNFKSNFDLAEDAKLQLSKDTYDDDLDNLLAQIGDQYADLFLAAKNLSDAILLSDILRVNTEITKAPLSASMIKRYDEHHQDLTLLKALVRQQLPEKYKEIFFDQSKNGYAGYIDGGASQEEFYKFIKPILEKMDGTEELLVKLNREDLLRKQRTFDNGSIPHQIHLGELHAILRRQEDFYPFLKDNREKIEKILTFRIPYYVGPLARGNSRFAWMTRKSEETITPWNFEEVVDKGASAQSFIERMTNFDKNLPNEKVLPKHSLLYEYFTVYNELTKVKYVTEGMRKPAFLSGEQKKAIVDLLFKTNRKVTVKQLKEDYFKKIECFDSVEISGVEDRFNASLGTYHDLLKIIKDKDFLDNEENEDILEDIVLTLTLFEDREMIEERLKTYAHLFDDKVMKQLKRRRYTGWGRLSRKLINGIRDKQSGKTILDFLKSDGFANRNFMQLIHDDSLTFKEDIQKAQVSGQGDSLHEHIANLAGSPAIKKGILQTVKVVDELVKVMGRHKPENIVIEMARENQTTQKGQKNSRERMKRIEEGIKELGSQILKEHPVENTQLQNEKLYLYYLQNGRDMYVDQELDINRLSDYDVDHIVPQSFLKDDSIDNKVLTRSDKNRGKSDNVPSEEVVKKMKNYWRQLLNAKLITQRKFDNLTKAERGGLSELDKAGFIKRQLVETRQITKHVAQILDSRMNTKYDENDKLIREVKVITLKSKLVSDFRKDFQFYKVREINNYHHAHDAYLNAVVGTALIKKYPKLESEFVYGDYKVYDVRKMIAKSEQEIGKATAKYFFYSNIMNFFKTEITLANGEIRKRPLIETNGETGEIVWDKGRDFATVRKVLSMPQVNIVKKTEVQTGGFSKESIRPKRNSDKLIARKKDWDPKKYGGFVSPTVAYSVLVVAKVEKGKSKKLKSVKELLGITIMERSSFEKNPIDFLEAKGYKEVKKDLIIKLPKYSLFELENGRKRMLASARFLQKGNELALPSKYVNFLYLASHYEKLKGSPEDNEQKQLFVEQHKHYLDEIIEQISEFSKRVILADANLDKVLSAYNKHRDKPIREQAENIIHLFTLTNLGAPRAFKYFDTTIDRKVYRSTKEVLDATLIHQSITGLYETRIDLSQLGGD

SEQ ID NO: 78 - protein, 167 aa, Escherichia coli
MSEVEFSHEYWMRHALTLAKRAWDEREVPVGAVLVHNNRVIGEGWNRPIGRHDPTAHAEIMALRQGGLVMQNYRLIDATLYVTLEPCVMCAGAMIHSRIGRVVFGARDAKTGAAGSLMDVLHHPGMNHRVEITEGILADECAALLSDFFRMRRQEIKAQKKAQSSTD

SEQ ID NO: 79 - protein, 167 aa, Escherichia coli
MSEVEFSHEYWMRHALTLAKRARDEREVPVGAVLVLNNRVIGEGWNRAIGLHDPTAHAEIMALRQGGLVMQNYRLIDATLYVTFEPCVMCAGAMIHSRIGRVVFGVRNAKTGAAGSLMDVLHYPGMNHRVEITEGILADECAALLCYFFRMPRQVFNAQKKAQSSTD

SEQ ID NO: 80 - protein, 167 aa, Escherichia coli
MSEVEFSHEYWMRHALTLAKRARDEREVPVGAVLVLNNRVIGEGWNRAIGLHDPTAHAEIMALRQGGLVMQNYRLIDATLYVTFEPCVMCAGAMIHSRIGRVVFGWRNAKTGAAGSLMDVLHYPGMNHRVEITEGILADECAALLCYFFRMPRQVFNAQKKAQSSTD

SEQ ID NO: 81 - protein, 160 aa, Staphylococcus aureus
MGSHMTNDIYFMTLAIEEAKKAAQLGEVPIGAIITKDDEVIARAHNLRETLQQPTAHAEHIAIERAAKVLGSWRLEGCTLYVTLEPCVMCAGTIVMSRIPRVVYGADDPKGGCSGSLMNLLQQSNFNHRAIVDKGVLKEACSTLLTTFFKNLRANKKSTN

SEQ ID NO: 82 - protein, 161 aa, Bacillus subtilis
MTQDELYMKEAIKEAKKAEEKGEVPIGAVLVINGEIIARAHNLRETEQRSIAHAEMLVIDEACKALGTWRLEGATLYVTLEPCPMCAGAVVLSRVEKVVFGAFDPKGGCSGTLMNLLQEERFNHQAEVVSGVLEEECGGMLSAFFRELRKKKKAARKNLSE

SEQ ID NO: 83 - protein, 183 aa, Salmonella typhimurium
MPPAFITGVTSLSDVELDHEYWMRHALTLAKRAWDEREVPVGAVLVHNHRVIGEGWNRPIGRHDPTAHAEIMALRQGGLVLQNYRLLDTTLYVTLEPCVMCAGAMVHSRIGRVVFGARDAKTGAAGSLIDVLHHPGMNHRVEIIEGVLRDECATLLSDFFRMRRQEIKALKKADRAEGAGPAV

SEQ ID NO: 84 - protein, 164 aa, Shewanella putrefaciens
MDEYWMQVAMQMAEKAEAAGEVPVGAVLVKDGQQIATGYNLSISQHDPTAHAEILCLRSAGKKLENYRLLDATLYITLEPCAMCAGAMVHSRIARVVYGARDEKTGAAGTVVNLLQHPAFNHQVEVTSGVLAEACSAQLSRFFKRRRDEKKALKLAQRAQQGIE

SEQ ID NO: 85 - protein, 173 aa, Haemophilus influenzae
MDAAKVRSEFDEKMMRYALELADKAEALGEIPVGAVLVDDARNIIGEGWNLSIVQSDPTAHAEIIALRNGAKNIQNYRLLNSTLYVTLEPCTMCAGAILHSRIKRLVFGASDYKTGAIGSRFHFFDDYKMNHTLEITSGVLAEECSQKLSTFFQKRREEKKIEKALLKSLSDK

SEQ ID NO: 86 - protein, 161 aa, Caulobacter crescentus
MRTDESEDQDHRMMRLALDAARAAAEAGETPVGAVILDPSTGEVIATAGNGPIAAHDPTAHAEIAAMRAAAAKLGNYRLTDLTLVVTLEPCAMCAGAISHARIGRVVFGADDPKGGAVVHGPKFFAQPTCHWRPEVTGGVLADESADLLRGFFRARRKAKI

SEQ ID NO: 87 - protein, 178 aa, Geobacter sulfurreducens
MSSLKKTPIRDDAYWMGKAIREAAKAAARDEVPIGAVIVRDGAVIGRGHNLREGSNDPSAHAEMIAIRQAARRSANWRLTGATLYVTLEPCLMCMGAIILARLERVVFGCYDPKGAAGSLYDLSADPRLNHQVRLSPGVCQEECGTMLSDFFRDLRRRKKAKATPALFIDERKVPPEP

SEQ ID NO: 88 - DNA, 23 bp, Artificial Sequence
  Synthetic
gtcagaagagatgtggtcaatgg

SEQ ID NO: 89 - protein, 178 aa, Escherichia coli
MRRAFITGVFFLSEVEFSHEYWMRHALTLAKRAWDEREVPVGAVLVHNNRVIGEGWNRPIGRHDPTAHAEIMALRQGGLVMQNYRLIDATLYVTLEPCVMCAGAMIHSRIGRVVFGARDAKTGAAGSLMDVLHHPGMNHRVEITEGILADECAALLSDFFRMRRQEIKAQKKAQSSTD

SEQ ID NO: 90 - DNA, 498 bp, Escherichia coli
tctgaggtggagttttcccacgagtactggatgagacatgccctgaccctggccaagagggcacgggatgagagggaggtgcctgtgggagccgtgctggtgctgaacaatagagtgatcggcgagggctggaacagagccatcggcctgcacgacccaacagcccatgccgaaattatggccctgagacagggcggcctggtcatgcagaactacagactgattgacgccaccctgtacgtgacattcgagccttgcgtgatgtgcgccggcgccatgatccactctaggatcggccgcgtggtgtttggcgtgaggaactcaaaaagaggcgccgcaggctccctgatgaacgtgctgaactaccccggcatgaatcaccgcgtcgaaattaccgagggaatcctggcagatgaatgtgccgccctgctgtgcgatttctatcggatgcctagacaggtgttcaatgctcagaagaaggcccagagctccatcaac

SEQ ID NO: 91 - protein, 167 aa, Escherichia coli
MSEVEFSHEYWMRHALTLAKRARDEREVPVGAVLVLNNRVIGEGWNRAIGLHDPTAHAEIMALRQGGLVMQNYRLIDATLYVTFEPCVMCAGAMIHSRIGRVVFGVRNSKRGAAGSLMNVLNYPGMNHRVEITEGILADECAALLCDFYRMPRQVFNAQKKAQSSIN

SEQ ID NO: 92 - protein, 198 aa, Homo Sapiens [sequence omitted]

SEQ ID NO: 93 - protein, 198 aa, Mus musculus
MDSLLMKQKKFLYHFKNVRWAKGRHETYLCYVVKRRDSATSCSLDFGHLRNKSGCHVELLFLRYISDWDLDPGRCYRVTWFTSWSPCYDCARHVAEFLRWNPNLSLRIFTARLYFCEDRKAEPEGLRRLHRAGVQIGIMTFKDYFYCWNTFVENRERTFKAWEGLHENSVRLTRQLRRILLPLYEVDDLRDAFRMLGF

SEQ ID NO: 94 - protein, 198 aa, Canis familiaris
MDSLLMKQRKFLYHFKNVRWAKGRHETYLCYVVKRRDSATSFSLDFGHLRNKSGCHVELLFLRYISDWDLDPGRCYRVTWFTSWSPCYDCARHVADFLRGYPNLSLRIFAARLYFCEDRKAEPEGLRRLHRAGVQIAIMTFKDYFYCWNTFVENREKTFKAWEGLHENSVRLSRQLRRILLPLYEVDDLRDAFRTLGL

SEQ ID NO: 95 - protein, 199 aa, Bos taurus
MDSLLKKQRQFLYQFKNVRWAKGRHETYLCYVVKRRDSPTSFSLDFGHLRNKAGCHVELLFLRYISDWDLDPGRCYRVTWFTSWSPCYDCARHVADFLRGYPNLSLRIFTARLYFCDKERKAEPEGLRRLHRAGVQIAIMTFKDYFYCWNTFVENHERTFKAWEGLHENSVRLSRQLRRILLPLYEVDDLRDAFRTLGL

SEQ ID NO: 96 - protein, 239 aa, Rattus norvegicus
MAVGSKPKAALVGPHWERERIWCFLCSTGLGTQQTGQTSRWLRPAATQDPVSPPRSLLMKQRKFLYHFKNVRWAKGRHETYLCYVVKRRDSATSFSLDFGYLRNKSGCHVELLFLRYISDWDLDPGRCYRVTWFTSWSPCYDCARHVADFLRGNPNLSLRIFTARLTGWGALPAGLMSPARPSDYFYCWNTFVENHERTFKAWEGLHENSVRLSRRLRRILLPLYEVDDLRDAFRTLGL

SEQ ID NO: 97 - protein, 429 aa, Mus musculus
MGPFCLGCSHRKCYSPIRNLISQETFKFHFKNLGYAKGRKDTFLCYEVTRKDCDSPVSLHHGVFKNKDNIHAEICFLYWFHDKVLKVLSPREEFKITWYMSWSPCFECAEQIVRFLATHHNLSLDIFSSRLYNVQDPETQQNLCRLVQEGAQVAAMDLYEFKKCWKKFVDNGGRRFRPWKRLLTNFRYQDSKLQEILRPCYIPVPSSSSSTLSNICLTKGLPETRFCVEGRRMDPLSEEEFYSQFYNQRVKHLCYYHRMKPYLCYQLEQFNGQAPLKGCLLSEKGKQHAEILFLDKIRSMELSQVTITCYLTWSPCPNCAWQLAAFKRDRPDLILHIYTSRLYFHWKRPFQKGLCSLWQSGILVDVMDLPQFTDCWTNFVNPKRPFWPWKGLEIISRRTQRRLRRIKESWGLQDLVNDFGNLQLGPPMS

SEQ ID NO: 98 - protein, 429 aa, Rattus norvegicus
MGPFCLGCSHRKCYSPIRNLISQETFKFHFKNLRYAIDRKDTFLCYEVTRKDCDSPVSLHHGVFKNKDNIHAEICFLYWFHDKVLKVLSPREEFKITWYMSWSPCFECAEQVLRFLATHHNLSLDIFSSRLYNIRDPENQQNLCRLVQEGAQVAAMDLYEFKKCWKKFVDNGGRRFRPWKKLLTNFRYQDSKLQEILRPCYIPVPSSSSSTLSNICLTKGLPETRFCVERRRVHLLSEEEFYSQFYNQRVKHLCYYHGVKPYLCYQLEQFNGQAPLKGCLLSEKGKQHAEILFLDKIRSMELSQVIITCYLTWSPCPNCAWQLAAFKRDRPDLILHIYTSRLYFHWKRPFQKGLCSLWQSGILVDVMDLPQFTDCWTNFVNPKRPFWPWKGLEIISRRTQRRLHRIKESWGLQDLVNDFGNLQLGPPMS

SEQ ID NO: 99 - protein, 370 aa, Macaca mulatta
MVEPMDPRTFVSNFNNRPILSGLNTVWLCCEVKTKDPSGPPLDAKIFQGKVYSKAKYHPEMRFLRWFHKWRQLHHDQEYKVTWYVSWSPCTRCANSVATFLAKDPKVTLTIFVARLYYFWKPDYQQALRILCQKRGGPHATMKIMNYNEFQDCWNKFVDGRGKPFKPRNNLPKHYTLLQATLGELLRHLMDPGTFTSNFNNKPWVSGQHETYLCYKVERLHNDTWVPLNQHRGFLRNQAPNIHGFPKGRHAELCFLDLIPFWKLDGQQYRVTCFTSWSPCFSCAQEMAKFISNNEHVSLCIFAARIYDDQGRYQEGLRALHRDGAKIAMMNYSEFEYCWDTFVDRQGRPFQPWDGLDEHSQALSGRLRAI

SEQ ID NO: 100 - protein, 384 aa, Pan troglodytes
MKPHFRNPVERMYQDTFSDNFYNRPILSHRNTVWLCYEVKTKGPSRPPLDAKIFRGQVYSKLKYHPEMRFFHWFSKWRKLHRDQEYEVTWYISWSPCTKCTRDVATFLAEDPKVTLTIFVARLYYFWDPDYQEALRSLCQKRDGPRATMKIMNYDEFQHCWSKFVYSQRELFEPWNNLPKYYILLHIMLGEILRHSMDPPTFTSNFNNELWVRGRHETYLCYEVERLHNDTWVLLNQRRGFLCNQAPHKHGFLEGRHAELCFLDVIPFWKLDLHQDYRVTCFTSWSPCFSCAQEMAKFISNNKHVSLCIFAARIYDDQGRCQEGLRTLAKAGAKISIMTYSEFKHCWDTFVDHQGCPFQPWDGLEEHSQALSGRLRAILQNQGN

SEQ ID NO: 101 - protein, 377 aa, Chlorocebus sabaeus
MNPQIRNMVEQMEPDIFVYYFNNRPILSGRNTVWLCYEVKTKDPSGPPLDANIFQGKLYPEAKDHPEMKFLHWFRKWRQLHRDQEYEVTWYVSWSPCTRCANSVATFLAEDPKVTLTIFVARLYYFWKPDYQQALRILCQERGGPHATMKIMNYNEFQHCWNEFVDGQGKPFKPRKNLPKHYTLLHATLGELLRHVMDPGTFTSNFNNKPWVSGQRETYLCYKVERSHNDTWVLLNQHRGFLRNQAPDRHGFPKGRHAELCFLDLIPFWKLDDQQYRVTCFTSWSPCFSCAQKMAKFISNNKHVSLCIFAARIYDDQGRCQEGLRTLHRDGAKIAVMNYSEFEYCWDTFVDRQGRPFQPWDGLDEHSQALSGRLRAI

SEQ ID NO: 102 - protein, 384 aa, Homo Sapiens
MKPHFRNTVERMYRDTFSYNFYNRPILSRRNTVWLCYEVKTKGPSRPPLDAKIFRGQVYSELKYHPEMRFFHWFSKWRKLHRDQEYEVTWYISWSPCTKCTRDMATFLAEDPKVTLTIFVARLYYFWDPDYQEALRSLCQKRDGPRATMKIMNYDEFQHCWSKFVYSQRELFEPWNNLPKYYILLHIMLGEILRHSMDPPTFTFNFNNEPWVRGRHETYLCYEVERMHNDTWVLLNQRRGFLCNQAPHKHGFLEGRHAELCFLDVIPFWKLDLDQDYRVTCFTSWSPCFSCAQEMAKFISKNKHVSLCIFTARIYDDQGRCQEGLRTLAEAGAKISIMTYSEFKHCWDTFVDHQGCPFQPWDGLDEHSQDLSGRLRAILQNQEN

SEQ ID NO: 103 - protein, 373 aa, Homo Sapiens
MKPHFRNTVERMYRDTFSYNFYNRPILSRRNTVWLCYEVKTKGPSRPRLDAKIFRGQVYSQPEHHAEMCFLSWFCGNQLPAYKCFQITWFVSWTPCPDCVAKLAEFLAEHPNVTLTISAARLYYYWERDYRRALCRLSQAGARVKIMDDEEFAYCWENFVYSEGQPFMPWYKFDDNYAFLHRTLKEILRNPMEAMYPHIFYFHFKNLRKAYGRNESWLCFTMEVVKHHSPVSWKRGVFRNQVDPETHCHAERCFLSWFCDDILSPNTNYEVTWYTSWSPCPECAGEVAEFLARHSNVNLTIFTARLYYFWDTDYQEGLRSLSQEGASVEIMGYKDFKYCWENFVYNDDEPFKPWKGLKYNFLFLDSKLQEILE

SEQ ID NO: 104 - protein, 382 aa, Homo Sapiens
MNPQIRNPMERMYRDTFYDNFENEPILYGRSYTWLCYEVKIKRGRSNLLWDTGVFRGQVYFKPQYHAEMCFLSWFCGNQLPAYKCFQITWFVSWTPCPDCVAKLAEFLSEHPNVTLTISAARLYYYWERDYRRALCRLSQAGARVTIMDYEEFAYCWENFVYNEGQQFMPWYKFDENYAFLHRTLKEILRYLMDPDTFTFNFNNDPLVLRRRQTYLCYEVERLDNGTWVLMDQHMGFLCNEAKNLLCGFYGRHAELRFLDLVPSLQLDPAQIYRVTWFISWSPCFSWGCAGEVRAFLQENTHVRLRIFAARIYDYDPLYKEALQMLRDAGAQVSIMTYDEFEYCWDTFVYRQGCPFQPWDGLEEHSQALSGRLRAILQNQGN

SEQ ID NO: 105 - protein, 396 aa, Rattus norvegicus
MQPQGLGPNAGMGPVCLGCSHRRPYSPIRNPLKKLYQQTFYFHFKNVRYAWGRKNNFLCYEVNGMDCALPVPLRQGVFRKQGHIHAELCFIYWFHDKVLRVLSPMEEFKVTWYMSWSPCSKCAEQVARFLAAHRNLSLAIFSSRLYYYLRNPNYQQKLCRLIQEGVHVAAMDLPEFKKCWNKFVDNDGQPFRPWMRLRINFSFYDCKLQEIFSRMNLLREDVFYLQFNNSHRVKPVQNRYYRRKSYLCYQLERANGQEPLKGYLLYKKGEQHVEILFLEKMRSMELSQVRITCYLTWSPCPNCARQLAAFKKDHPDLILRIYTSRLYFYWRKKFQKGLCTLWRSGIHVDVMDLPQFADCWTNFVNPQRPFRPWNELEKNSWRIQRRLRRIKESWGL

SEQ ID NO: 106 - protein, 227 aa, Bos taurus
DGWEVAFRSGTVLKAGVLGVSMTEGWAGSGHPGQGACVWTPGTRNTMNLLREVLFKQQFGNQPRVPAPYYRRKTYLCYQLKQRNDLTLDRGCFRNKKQRHAEIRFIDKINSLDLNPSQSYKIICYITWSPCPNCANELVNFITRNNHLKLEIFASRLYFHWIKSFKMGLQDLQNAGISVAVMTHTEFEDCWEQFVDNQSRPFQPWDKLEQYSASIRRRLQRILTAPI

SEQ ID NO: 107 - protein, 490 aa, Pan troglodytes
MNPQIRNPMEWMYQRTFYYNFENEPILYGRSYTWLCYEVKIRRGHSNLLWDTGVFRGQMYSQPEHHAEMCFLSWFCGNQLSAYKCFQITWFVSWTPCPDCVAKLAKFLAEHPNVTLTISAARLYYYWERDYRRALCRLSQAGARVKIMDDEEFAYCWENFVYNEGQPFMPWYKFDDNYAFLHRTLKEIIRHLMDPDTFTFNFNNDPLVLRRHQTYLCYEVERLDNGTWVLMDQHMGFLCNEAKNLLCGFYGRHAELRFLDLVPSLQLDPAQIYRVTWFISWSPCFSWGCAGQVRAFLQENTHVRLRIFAARIYDYDPLYKEALQMLRDAGAQVSIMTYDEFEYCWDTFVYRQGCPFQPWDGLEEHSQALSGRLRAILQVRASSLCMVPHRPPPPPQSPGPCLPLCSEPPLGSLLPTGRPAPSLPFLLTASFSFPPPASLPPLPSLSLSPGHLPVPSFHSLTSCSIQPPCSSRIRETEGWASVSKEGRDLG

SEQ ID NO: 108 - protein, 190 aa, Homo Sapiens
MNPQIRNPMKAMYPGTFYFQFKNLWEANDRNETWLCFTVEGIKRRSVVSWKTGVFRNQVDSETHCHAERCFLSWFCDDILSPNTKYQVTWYTSWSPCPDCAGEVAEFLARHSNVNLTIFTARLYYFQYPCYQEGLRSLSQEGVAVEIMDYEDFKYCWENFVYNDNEPFKPWKGLKTNFRLLKRRLRESLQ

SEQ ID NO: 109 - protein, 190 aa, Gorilla beringei
MNPQIRNPMKAMYPGTFYFQFKNLWEANDRNETWLCFTVEGIKRRSVVSWKTGVFRNQVDSETHCHAERCFLSWFCDDILSPNTNYQVTWYTSWSPCPECAGEVAEFLARHSNVNLTIFTARLYYFQDTDYQEGLRSLSQEGVAVKIMDYKDFKYCWENFVYNDDEPFKPWKGLKYNFRFLKRRLQEILE

SEQ ID NO: 110 - protein, 199 aa, Homo Sapiens
MEASPASGPRHLMDPHIFTSNFNNGIGRHKTYLCYEVERLDNGTSVKMDQHRGFLHNQAKNLLCGFYGRHAELRFLDLVPSLQLDPAQIYRVTWFISWSPCFSWGCAGEVRAFLQENTHVRLRIFAARIYDYDPLYKEALQMLRDAGAQVSIMTYDEFKHCWDTFVDHQGCPFQPWDGLDEHSQALSGRLRAILQNQGN

SEQ ID NO: 111 - protein, 202 aa, Macaca mulatta
MDGSPASRPRHLMDPNTFTFNFNNDLSVRGRHQTYLCYEVERLDNGTWVPMDERRGFLCNKAKNVPCGDYGCHVELRFLCEVPSWQLDPAQTYRVTWFISWSPCFRRGCAGQVRVFLQENKHVRLRIFAARIYDYDPLYQEALRTLRDAGAQVSIMTYEEFKHCWDTFVDRQGRPFQPWDGLDEHSQALSGRLRAILQNQGN

SEQ ID NO: 112 - protein, 185 aa, Bos taurus
MDEYTFTENFNNQGWPSKTYLCYEMERLDGDATIPLDEYKGFVRNKGLDQPEKPCHAELYFLGKIHSWNLDRNQHYRLTCFISWSPCYDCAQKLTTFLKENHHISLHILASRIYTHNRFGCHQSGLCELQAAGARITIMTFEDFKHCWETFVDHKGKPFQPWEGLNVKSQALCTELQAILKTQQN

SEQ ID NO: 113 - protein, 200 aa, Homo Sapiens
MALLTAETFRLQFNNKRRLRRPYYPRKALLCYQLTPQNGSTPTRGYFENKKKCHAEICFINEIKSMGLDETQCYQVTCYLTWSPCSSCAWELVDFIKAHDHLNLGIFASRLYYHWCKPQQKGLRLLCGSQVPVEVMGFPKFADCWENFVDHEKPLSFNPYKMLEELDKNSRAIKRRLERIKIPGVRAQGRYMDILCDAEV

SEQ ID NO: 114 - protein, 210 aa, Macaca mulatta
MALLTAKTFSLQFNNKRRVNKPYYPRKALLCYQLTPQNGSTPTRGHLKNKKKDHAEIRFINKIKSMGLDETQCYQVTCYLTWSPCPSCAGELVDFIKAHRHLNLRIFASRLYYHWRPNYQEGLLLLCGSQVPVEVMGLPEFTDCWENFVDHKEPPSFNPSEKLEELDKNSQAIKRRLERIKSRSVDVLENGLRSLQLGPVTPSSSIRNSR

SEQ ID NO: 115 - protein, 386 aa, Homo Sapiens
MNPQIRNPMERMYRDTFYDNFENEPILYGRSYTWLCYEVKIKRGRSNLLWDTGVFRGPVLPKRQSNHRQEVYFRFENHAEMCFLSWFCGNRLPANRRFQITWFVSWNPCLPCVVKVTKFLAEHPNVTLTISAARLYYYRDRDWRWVLLRLHKAGARVKIMDYEDFAYCWENFVCNEGQPFMPWYKFDDNYASLHRTLKEILRNPMEAMYPHIFYFHFKNLLKACGRNESWLCFTMEVTKHHSAVFRKRGVFRNQVDPETHCHAERCFLSWFCDDILSPNTNYEVTWYTSWSPCPECAGEVAEFLARHSNVNLTIFTARLCYFWDTDYQEGLCSLSQEGASVKIMGYKDFVSCWKNFVYSDDEPFKPWKGLQTNFRLLKRRLREILQ

SEQ ID NO: 116 - protein, 236 aa, Homo Sapiens
MTSEKGPSTGDPTLRRRIEPWEFDVFYDPRELRKEACLLYEIKWGMSRKIWRSSGKNTTNHVEVNFIKKFTSERDFHPSMSCSITWFLSWSPCWECSQAIREFLSRHPGVTLVIYVARLFWHMDQQNRQGLRDLVNSGVTIQIMRASEYYHCWRNFVNYPPGDEAHWPQYPPLWMMLYALELHCIILSLPPCLKISRRWQNHLTFFRLHLQNCHYQTIPPHILLATGLIHPSVAWR

SEQ ID NO: 117 - protein, 229 aa, Mus musculus
MSSETGPVAVDPTLRRRIEPHEFEVFFDPRELRKETCLLYEINWGGRHSVWRHTSQNTSNHVEVNFLEKFTTERYFRPNTRCSITWFLSWSPCGECSRAITEFLSRHPYVTLFIYIARLYHHTDQRNRQGLRDLISSGVTIQIMTEQEYCYCWRNFVNYPPSNEAYWPRYPHLWVKLYVLELYCIILGLPPCLKILRRKQPQLTFFTITLQTCHYQRIPPHLLWATGLK

SEQ ID NO: 118 - protein, 229 aa, Rattus norvegicus [sequence omitted]

SEQ ID NO: 119 - protein, 224 aa, Homo Sapiens
MAQKEEAAVATEAASQNGEDLENLDDPEKLKELIELPPFEIVTGERLPANFFKFQFRNVEYSSGRNKTFLCYVVEAQGKGGQVQASRGYLEDEHAAAHAEEAFFNTILPAFDPALRYNVTWYVSSSPCAACADRIIKTLSKTKNLRLLILVGRLFMWEEPEIQAALKKLKEAGCKLRIMKPQDFEYVWQNFVEQEEGESKAFQPWEDIQENFLYYEEKLADILK

SEQ ID NO: 120 - protein, 224 aa, Mus musculus
MAQKEEAAEAAAPASQNGDDLENLEDPEKLKELIDLPPFEIVTGVRLPVNFFKFQFRNVEYSSGRNKTFLCYVVEVQSKGGQAQATQGYLEDEHAGAHAEEAFFNTILPAFDPALKYNVTWYVSSSPCAACADRILKTLSKTKNLRLLILVSRLFMWEEPEVQAALKKLKEAGCKLRIMKPQDFEYIWQNFVEQEEGESKAFEPWEDIQENFLYYEEKLADILK

SEQ ID NO: 121 - protein, 224 aa, Rattus norvegicus
MAQKEEAAEAAAPASQNGDDLENLEDPEKLKELIDLPPFEIVTGVRLPVNFFKFQFRNVEYSSGRNKTFLCYVVEAQSKGGQVQATQGYLEDEHAGAHAEEAFFNTILPAFDPALKYNVTWYVSSSPCAACADRILKTLSKTKNLRLLILVSRLFMWEEPEVQAALKKLKEAGCKLRIMKPQDFEYLWQNFVEQEEGESKAFEPWEDIQENFLYYEEKLADILK

SEQ ID NO: 122 - protein, 224 aa, Bos taurus
MAQKEEAAAAAEPASQNGEEVENLEDPEKLKELIELPPFEIVTGERLPAHYFKFQFRNVEYSSGRNKTFLCYVVEAQSKGGQVQASRGYLEDEHATNHAEEAFFNSIMPTFDPALRYMVTWYVSSSPCAACADRIVKTLNKTKNLRLLILVGRLFMWEEPEIQAALRKLKEAGCRLRIMKPQDFEYIWQNFVEQEEGESKAFEPWEDIQENFLYYEEKLADILK

SEQ ID NO: 123 - protein, 208 aa, Petromyzon marinus
MTDAEYVRIHEKLDIYTFKKQFFNNKKSVSHRCYVLFELKRRGERRACFWGYAVNKPQSGTERGIHAEIFSIRKVEEYLRDNPGQFTINWYSSWSPCADCAEKILEWYNQELRGNGHTLKIWACKLYYEKNARNQIGLWNLRDNGVGLNVMVSEHYQCCRKIFIQSSHNQLNENRWLEKTLKRAEKRRSELSIMIQVKILHTTKSPAV

SEQ ID NO: 124 - protein, 384 aa, Homo Sapiens
MKPHFRNTVERMYRDTFSYNFYNRPILSRRNTVWLCYEVKTKGPSRPPLDAKIFRGQVYSELKYHPEMRFFHWFSKWRKLHRDQEYEVTWYISWSPCTKCTRDMATFLAEDPKVTLTIFVARLYYFWDPDYQEALRSLCQKRDGPRATMKIMNYDEFQHCWSKFVYSQRELFEPWNNLPKYYILLHIMLGEILRHSMDPPTFTFNFNNEPWVRGRHETYLCYEVERMHNDTWVLLNQRRGFLCNQAPHKHGFLEGRHAELCFLDVIPFWKLDLDQDYRVTCFTSWSPCFSCAQEMAKFISKNKHVSLCIFTARIYRRQGRCQEGLRTLAEAGAKISIMTYSEFKHCWDTFVDHQGCPFQPWDGLDEHSQDLSGRLRAILQNQEN

SEQ ID NO: 125 - protein, 184 aa, Homo Sapiens
MDPPTFTFNFNNEPWVRGRHETYLCYEVERMHNDTWVLLNQRRGFLCNQAPHKHGFLEGRHAELCFLDVIPFWKLDLDQDYRVTCFTSWSPCFSCAQEMAKFISKNKHVSLCIFTARIYDDQGRCQEGLRTLAEAGAKISIMTYSEFKHCWDTFVDHQGCPFQPWDGLDEHSQDLSGRLRAILQ

SEQ ID NO: 126 - protein, 184 aa, Homo Sapiens
MDPPTFTFNFNNEPWVRGRHETYLCYEVERMHNDTWVLLNQRRGFLCNQAPHKHGFLEGRHAELCFLDVIPFWKLDLDQDYRVTCFTSWSPCFSCAQEMAKFISKNKHVSLCIFTARIYRRQGRCQEGLRTLAEAGAKISIMTYSEFKHCWDTFVDHQGCPFQPWDGLDEHSQDLSGRLRAILQ

SEQ ID NO: 127 - protein, 162 aa, Artificial Sequence
  Synthetic
MFERNYDPRELRKETYLLYEIKWGKSGKLWRHWCQNNRTQHAEVYFLENIFNARRFNPSTHCSITWYLSWSPCAECSQKIVDFLKEHPNVNLEIYVARLYYHEDERNRQGLRDLVNSGVTIRIMDLPDYNYCWKTFVSDQGGDEDYWPGHFAPWIKQYSLKL

SEQ ID NO: 128 - protein, 162 aa, Artificial Sequence
  Synthetic
MFERNYDPRELRKETYLLYEIKWGKSGKLWRHWCQNNRTQHAEVYFLENIFNARRFNPSTHCSITWYLSWSPCAECSQKIVDFLKEHPNVNLEIYVARLYYPENERNRQGLRDLVNSGVTIRIMDLPDYNYCWKTFVSDQGGDEDYWPGHFAPWIKQYSLKL

SEQ ID NO: 129 - protein, 229 aa, Rattus norvegicus [sequence omitted]

SEQ ID NO: 130 - protein, 229 aa, Artificial Sequence
  Synthetic
MSSKTGPVAVDPTLRRRIEPHEFEVFFDPRELRKETCLLYEINWGGRHSIWRHTSQNTNKHVEVNFIEKFTTERYFCPNTRCSITWFLSWSPCGECSRAITEFLSRYPNVTLFIYIARLYHLANPRNRQGLRDLISSGVTIQIMTEQESGYCWHNFVNYSPSNESHWPRYPHLWVRLYVLELYCIILGLPPCLNILRRKQSQLTSFTIALQSCHYQRLPPHILWATGLK

SEQ ID NO: 131 - protein, 208 aa, Petromyzon marinus; identical to SEQ ID NO: 123

SEQ ID NO: 132 - protein, 208 aa, Artificial Sequence
  Synthetic
MTDAEYVRIHEKLDIYTFKKQFSNNKKSVSHRCYVLFELKRRGERRACFWGYAVNKPQSGTERGIHAEIFSIRKVEEYLRDNPGQFTINWYSSWSPCADCAEKILEWYNQELRGNGHTLKIWVCKLYYEKNARNQIGLWNLRDNGVGLNVMVSEHYQCCRKIFIQSSHNQLNENRWLEKTLKRAEKRRSELSIMFQVKILHTTKSPAV

SEQ ID NO: 133 - protein, 229 aa, Artificial Sequence
  Synthetic
MSSETGPVAVDPTLRRRIEPHEFEVFFDPRELRKETCLLYEIKWGTSHKIWRHSSKNTTKHVEVNFIEKFTSERHFCPSTSCSITWFLSWSPCGECSKAITEFLSQHPNVTLVIYVARLYHHMDQQNRQGLRDLVNSGVTIQIMTAPEYDYCWRNFVNYPPGKEAHWPRYPPLWMKLYALELHAGILGLPPCLNILRRKQPQLTFFTIALQSCHYQRLPPHILWATGLK

SEQ ID NO: 134 - protein, 229 aa, Artificial Sequence
  Synthetic
MSSKTGPVAVDPTLRRRIEPHEFEVFFDPRELRKETCLLYEIKWGTSHKIWRHSSKNTTKHVEVNFIEKFTSERHFCPSTSCSITWFLSWSPCGECSKAITEFLSQHPNVTLVIYVARLYHLMNQQNRQGLRDLVNSGVTIQIMTAPEYDYCWHNFVNYPPGKESHWPRYPPLWMKLYALELHAGILGLPPCLNILRRKQSQLTSFTIALQSCHYQRLPPHILWATGLK

SEQ ID NO: 135 - protein, 1 aa, Artificial Sequence
  Synthetic
  REPEAT (1)..(1)
G

SEQ ID NO: 136 - protein, 2 aa, Artificial Sequence
  Synthetic
  REPEAT (1)..(2)
  misc_feature (1)..(1): Xaa can be any naturally occuring amino acid
XP

SEQ ID NO: 137 - protein, 3 aa, Artificial Sequence
  Synthetic
  REPEAT (1)..(3)
GGS

SEQ ID NO: 138 - protein, 4 aa, Artificial Sequence
  Synthetic
  REPEAT (1)..(4)
SGGS

SEQ ID NO: 139 - protein, 4 aa, Artificial Sequence
  Synthetic
  REPEAT (1)..(4)
SGGS

SEQ ID NO: 140 - protein, 4 aa, Artificial Sequence
  Synthetic
  REPEAT (1)..(4)
GGGS

SEQ ID NO: 141 - protein, 5 aa, Artificial Sequence
  Synthetic
  REPEAT (1)..(5)
GGGGS

SEQ ID NO: 142 - protein, 5 aa, Artificial Sequence
  Synthetic
  REPEAT (1)..(5)
EAAAK

SEQ ID NO: 143 - protein, 16 aa, Artificial Sequence
  Synthetic
SGSETPGTSESATPES

SEQ ID NO: 144 - protein, 32 aa, Artificial Sequence
  Synthetic
SGGSSGGSSGSETPGTSESATPESSGGSSGGS

SEQ ID NO: 145 - protein, 24 aa, Artificial Sequence
  Synthetic
  REPEAT (1)..(4)
  REPEAT (21)..(24)
SGGSSGSETPGTSESATPESSGGS

SEQ ID NO: 146 - protein, 24 aa, Artificial Sequence
  Synthetic
SGGSSGGSSGSETPGTSESATPES

SEQ ID NO: 147 - protein, 32 aa, Artificial Sequence; identical to SEQ ID NO: 144
  Synthetic

SEQ ID NO: 148 - protein, 40 aa, Artificial Sequence
  Synthetic
SGGSSGGSSGSETPGTSESATPESSGGSSGGSSGGSSGGS

SEQ ID NO: 149 - protein, 64 aa, Artificial Sequence
  Synthetic
SGGSSGGSSGSETPGTSESATPESSGGSSGGSSGGSSGGSSGSETPGTSESATPESSGGSSGGS

SEQ ID NO: 150 - protein, 92 aa, Artificial Sequence
  Synthetic
PGSPAGSPTSTEEGTSESATPESGPGTSTEPSEGSAPGSPAGSPTSTEEGTSTEPSEGSAPGTSTEPSEGSAPGTSESATPESGPGSEPATS

SEQ ID NO: 151 - protein, 104 aa, Artificial Sequence
  Synthetic
GGSGGSPGSPAGSPTSTEEGTSESATPESGPGTSTEPSEGSAPGSPAGSPTSTEEGTSTEPSEGSAPGTSTEPSEGSAPGTSESATPESGPGSEPATSGGSGGS

SEQ ID NO: 152 - protein, 7 aa, Artificial Sequence
  Synthetic
PKKKRKV

SEQ ID NO: 153 - protein, 8 aa, Artificial Sequence
  Synthetic
VSRKRPRP

SEQ ID NO: 154 - protein, 9 aa, Artificial Sequence
  Synthetic
PAAKRVKLD

SEQ ID NO: 155 - protein, 9 aa, Artificial Sequence
  Synthetic
KLKIKRPVK

SEQ ID NO: 156 - protein, 10 aa, Artificial Sequence
  Synthetic
EGAPPAKRAR

SEQ ID NO: 157 - protein, 12 aa, Artificial Sequence
  Synthetic
PPQPKKKPLDGE

SEQ ID NO: 158 - protein, 19 aa, Artificial Sequence
  Synthetic
MKRTADGSEFESPKKKRKV

SEQ ID NO: 159 - protein, 20 aa, Artificial Sequence
  Synthetic
AVKRPAATKKAGQAKKKKLD

SEQ ID NO: 160 - protein, 21 aa, Artificial Sequence
  Synthetic
SGGSKRTADGSEFEPKKKRKV

SEQ ID NO: 161 - protein, 25 aa, Artificial Sequence
  Synthetic
MSRRRKANPTKLSENAKKLAKEVEN

SEQ ID NO: 162 - protein, 30 aa, Artificial Sequence
  Synthetic
MDSLLMNRRKFLYQFKNVRWAKGRRETYLC

SEQ ID NO: 163 - protein, 84 aa, Artificial Sequence
  Synthetic
MTNLSDIIEKETGKQLVIQESILMLPEEVEEVIGNKPESDILVHTAYDESTDENVMLLTSDAPEYKPWALVIQDSNGENKIKML

SEQ ID NO: 164 - protein, 413 aa, Artificial Sequence
  Synthetic
CLAEGTRIFDPVTGTTHRIEDVVDGRKPIHVVAAAKDGTLLARPVVSWFDQGTRDVIGLRIAGGAIVWATPDHKVLTEYGWRAAGELRKGDRVAGPGGSGNSLALSLTADQMVSALLDAEPPILYSEYDPTSPFSEASMMGLLTNLADRELVHMINWAKRVPGFVDLTLHDQAHLLECAWLEILMIGLVWRSMEHPGKLLFAPNLLLDRNQGKCVEGMVEIFDMLLATSSRFRMMNLQGEEFVCLKSIILLNSGVYTFLSSTLKSLEEKDHIHRALDKITDTLIHLMAKAGLTLQQQHQRLAQLLLILSHIRHMSNKGMEHLYSMKYKNVVPLYDLLLEMLDAHRLHAGGSGASRVQAFADALDDKFLHDMLAEELRYSVIREVLPTRRARTFDLEVEELHTLVAEGVVVHNC

SEQ ID NO: 165 - protein, 413 aa, Artificial Sequence
  Synthetic
CLAEGTRIFDPVTGTTHRIEDVVDGRKPIHVVAVAKDGTLLARPVVSWFDQGTRDVIGLRIAGGAIVWATPDHKVLTEYGWRAAGELRKGDRVAGPGGSGNSLALSLTADQMVSALLDAEPPILYSEYDPTSPFSEASMMGLLTNLADRELVHMINWAKRVPGFVDLTLHDQAHLLECAWLEILMIGLVWRSMEHPGKLLFAPNLLLDRNQGKCVEGMVEIFDMLLATSSRFRMMNLQGEEFVCLKSIILLNSGVYTFLSSTLKSLEEKDHIHRALDKITDTLIHLMAKAGLTLQQQHQRLAQLLLILSHIRHMSNKGMEHLYSMKYTNVVPLYDLLLEMLDAHRLHAGGSGASRVQAFADALDDKFLHDMLAEELRYSVIREVLPTRRARTFDLEVEELHTLVAEGVVVHNC

SEQ ID NO: 166 - protein, 413 aa, Artificial Sequence
  Synthetic
CLAEGTRIFDPVTGTTHRIEDVVDGRKPIHVVAAAKDGTLLARPVVSWFDQGTRDVIGLRIAGGATVWATPDHKVLTEYGWRAAGELRKGDRVAGPGGSGNSLALSLTADQMVSALLDAEPPIPYSEYDPTSPFSEASMMGLLTNLADRELVHMINWAKRVPGFVDLTLHDQAHLLECAWLEILMIGLVWRSMEHPGKLLFAPNLLLDRNQGKCVEGMVEIFDMLLATSSRFRMMNLQGEEFVCLKSIILLNSGVYTFLSSTLKSLEEKDHIHRALDKITDTLIHLMAKAGLTLQQQHQRLAQLLLILSHIRHMSNKGMEHLYSMKYKNVVPLYDLLLEMLDAHRLHAGGSGASRVQAFADALDDKFLHDMLAEGLRYSVIREVLPTRRARTFDLEVEELHTLVAEGVVVHNC

SEQ ID NO: 167 - protein, 413 aa, Artificial Sequence
  Synthetic
CLAEGTRIFDPVTGTTHRIEDVVDGRKPIHVVAAAKDGTLLARPVVSWFDQGTRDVIGLRIAGGATVWATPDHKVLTEYGWRAAGELRKGDRVAGPGGSGNSLALSLTADQMVSALLDAEPPILYSEYDPTSPFSEASMMGLLTNLADRELVHMINWAKRVPGFVDLTLHDQAHLLECAWLEILMIGLVWRSMEHPGKLLFAPNLLLDRNQGKCVEGMVEIFDMLLATSSRFRMMNLQGEEFVCLKSIILLNSGVYTFLSSTLKSLEEKDHIHRALDKITDTLIHLMAKAGLTLQQQHQRLAQLLLILSHIRHMSNKGMEHLYSMKYKNVVPLYDLLLEMLDAHRLHAGGSGASRVQAFADALDDKFLHDMLAEELRYSVIREVLPTRRARTFDLEVEELHTLVAEGVVVHNC

SEQ ID NO: 168 - protein, 413 aa, Artificial Sequence
  Synthetic
CLAEGTRIFDPVTGTTHRIEDVVDGRKPIHVVAAAKDGTLLARPVVSWFDQGTRDVIGLRIAGGATVWATPDHKVLTEYGWRAAGELRKGDRVAGPGGSGNSLALSLTADQMVSALLDAEPPIPYSEYDPTSPFSEASMMGLLTNLADRELVHMINWAKRVPGFVDLTLHDQAHLLECAWLEILMIGLVWRSMEHPGKLLFAPNLLLDRNQGKCVEGMVEIFDMLLATSSRFRMMNLQGEEFVCLKSIILLNSGVYTFLSSTLKSLEEKDHIHRALDKITDTLIHLMAKAGLTLQQQHQRLAQLLLILSHIRHMSNKGMEHLYSMKYKNVVPLYDLLLEMLDAHRLHAGGSGASRVQAFADALDDKFLHDMLAEELRYSVIREVLPTRRARTFDLEVEELHTLVAEGVVVHNC

SEQ ID NO: 169 - protein, 413 aa, Artificial Sequence
  Synthetic
CLAEGTRIFDPVTGTTHRIEDVVDGRKPIHVVAAAKDGTLLARPVVSWFDQGTRDVIGLRIAGGATVWATPDHKVLTEYGWRAAGELRKGDRVAGPGGSGNSLALSLTADQMVSALLDAEPPILYSEYNPTSPFSEASMMGLLTNLADRELVHMINWAKRVPGFVDLTLHDQAHLLERAWLEILMIGLVWRSMEHPGKLLFAPNLLLDRNQGKCVEGMVEIFDMLLATSSRFRMMNLQGEEFVCLKSIILLNSGVYTFLSSTLKSLEEKDHIHRALDKITDTLIHLMAKAGLTLQQQHQRLAQLLLILSHIRHMSNKGMEHLYSMKYKNVVPLYDLLLEMLDAHRLHAGGSGASRVQAFADALDDKFLHDMLAEGLRYSVIREVLPTRRARTFDLEVEELHTLVAEGVVVHNC

SEQ ID NO: 170 - protein, 413 aa, Artificial Sequence
  Synthetic
CLAEGTRIFDPVTGTTHRIEDVVDGRKPIHVVAAAKDGTLLARPVVSWFDQGTRDVIGLRIAGGAIVWATPDHKVLTEYGWRAAGELRKGDRVAGPGGSGNSLALSLTADQMVSALLDAEPPILYSEYDPTSPFSEASMMGLLTNLADRELVHMINWAKRVPGFVDLTLHDQAHLLERAWLEILMIGLVWRSMEHPGKLLFAPNLLLDRNQGKCVEGMVEIFDMLLATSSRFRMMNLQGEEFVCLKSIILLNSGVYTFLSSTLKSLEEKDHIHRALDKITDTLIHLMAKAGLTLQQQHQRLAQLLLILSHIRHMSNKGMEHLYSMKYKNVVPLYDLLLEMLDAHRLHAGGSGASRVQAFADALDDKFLHDMLAEGLRYSVIREVLPTRRARTFDLEVEELHTLVAEGVVVHNC

SEQ ID NO: 171 - protein, 413 aa, Artificial Sequence
  Synthetic
CLAEGTRIFDPVTGTTHRIEDVVDGRKPIHVVAVAKDGTLLARPVVSWFDQGTRDVIGLRIAGGATVWATPDHKVLTEYGWRAAGELRKGDRVAGPGGSGNSLALSLTADQMVSALLDAEPPILYSEYDPTSPFSEASMMGLLTNLADRELVHMINWAKRVPGFVDLTLHDQAHLLERAWLEILMIGLVWRSMEHPGKLLFAPNLLLDRNQGKCVEGMVEIFDMLLATSSRFRMMNLQGEEFVCLKSIILLNSGVYTFLSSTLKSLEEKDHIHRALDKITDTLIHLMAKAGLTLQQQHQRLAQLLLILSHIRHMSNKGMEHLYSMKYKNVVPLYDLLLEMLDAHRLHAGGSGASRVQAFADALDDKFLHDMLAEELRYSVIREVLPTRRARTFDLEVEELHTLVAEGVVVHNC

SEQ ID NO: 172 - DNA, 33 bp, Artificial Sequence
  Synthetic
gccaacatgaggatcacccatgtctgcagggcc

SEQ ID NO: 173 - protein, 131 aa, Artificial Sequence
  Synthetic
GSASNFTQFVLVDNGGTGDVTVAPSNFANGVAEWISSNSRSQAYKVTCSVRQSSAQNRKYTIKVEVPKVATQTVGGEELPVAGWRSYLNMELTIPIFATNSDCELIVKAMQGLLKDGNPIPSAIAANSGIY

SEQ ID NO: 174 - protein, 1561 aa, Artificial Sequence
  Synthetic
MSEVEFSHEYWMRHALTLAKRAWDEREVPVGAVLVHNNRVIGEGWNRPIGRHDPTAHAEIMALRQGGLVMQNYRLIDATLYVTLEPCVMCAGAMIHSRIGRVVFGARDAKTGAAGSLMDVLHHPGMNHRVEITEGILADECAALLSDFFRMRRQEIKAQKKAQSSTDSGSETPGTSESATPESDKKYSIGLAIGTNSVGWAVITDEYKVPSKKFKVLGNTDRHSIKKNLIGALLFDSGETAEATRLKRTARRRYTRRKNRICYLQEIFSNEMAKVDDSFFHRLEESFLVEEDKKHERHPIFGNIVDEVAYHEKYPTIYHLRKKLVDSTDKADLRLIYLALAHMIKFRGHFLIEGDLNPDNSDVDKLFIQLVQTYNQLFEENPINASGVDAKAILSARLSKSRRLENLIAQLPGEKKNGLFGNLIALSLGLTPNFKSNFDLAEDAKLQLSKDTYDDDLDNLLAQIGDQYADLFLAAKNLSDAILLSDILRVNTEITKAPLSASMIKRYDEHHQDLTLLKALVRQQLPEKYKEIFFDQSKNGYAGYIDGGASQEEFYKFIKPILEKMDGTEELLVKLNREDLLRKQRTFDNGSIPHQIHLGELHAILRRQEDFYPFLKDNREKIEKILTFRIPYYVGPLARGNSRFAWMTRKSEETITPWNFEEVVDKGASAQSFIERMTNFDKNLPNEKVLPKHSLLYEYFTVYNELTKVKYVTEGMRKPAFLSGEQKKAIVDLLFKTNRKVTVKQLKEDYFKKIECFDSVEISGVEDRFNASLGTYHDLLKIIKDKDFLDNEENEDILEDIVLTLTLFEDREMIEERLKTYAHLFDDKVMKQLKRRRYTGWGRLSRKLINGIRDKQSGKTILDFLKSDGFANRNFMQLIHDDSLTFKEDIQKAQVSGQGDSLHEHIANLAGSPAIKKGILQTVKVVDELVKVMGRHKPENIVIEMARENQTTQKGQKNSRERMKRIEEGIKELGSQILKEHPVENTQLQNEKLYLYYLQNGRDMYVDQELDINRLSDYDVDHIVPQSFLKDDSIDNKVLTRSDKNRGKSDNVPSEEVVKKMKNYWRQLLNAKLITQRKFDNLTKAERGGLSELDKAGFIKRQLVETRQITKHVAQILDSRMNTKYDENDKLIREVKVITLKSKLVSDFRKDFQFYKVREINNYHHAHDAYLNAVVGTALIKKYPKLESEFVYGDYKVYDVRKMIAKSEQEIGKATAKYFFYSNIMNFFKTEITLANGEIRKRPLIETNGETGEIVWDKGRDFATVRKVLSMPQVNIVKKTEVQTGGFSKESILPKRNSDKLIARKKDWDPKKYGGFDSPTVAYSVLVVAKVEKGKSKKLKSVKELLGITIMERSSFEKNPIDFLEAKGYKEVKKDLIIKLPKYSLFELENGRKRMLASAGELQKGNELALPSKYVNFLYLASHYEKLKGSPEDNEQKQLFVEQHKHYLDEIIEQISEFSKRVILADANLDKVLSAYNKHRDKPIREQAENIIHLFTLTNLGAPAAFKYFDTTIDRKRYTSTKEVLDATLIHQSITGLYETRIDLSQLGGDSGGSPKKKRKV

SEQ ID NO: 175 - protein, 1561 aa, Artificial Sequence
  Synthetic
MSEVEFSHEYWMRHALTLAKRAWDEREVPVGAVLVHNNRVIGEGWNRPIGRHDPTAHAEIMALRQGGLVMQNYRLIDATLYVTLEPCVMCAGAMIHSRIGRVVFGARNAKTGAAGSLMDVLHHPGMNHRVEITEGILADECAALLSDFFRMRRQEIKAQKKAQSSTDSGSETPGTSESATPESDKKYSIGLAIGTNSVGWAVITDEYKVPSKKFKVLGNTDRHSIKKNLIGALLFDSGETAEATRLKRTARRRYTRRKNRICYLQEIFSNEMAKVDDSFFHRLEESFLVEEDKKHERHPIFGNIVDEVAYHEKYPTIYHLRKKLVDSTDKADLRLIYLALAHMIKFRGHFLIEGDLNPDNSDVDKLFIQLVQTYNQLFEENPINASGVDAKAILSARLSKSRRLENLIAQLPGEKKNGLFGNLIALSLGLTPNFKSNFDLAEDAKLQLSKDTYDDDLDNLLAQIGDQYADLFLAAKNLSDAILLSDILRVNTEITKAPLSASMIKRYDEHHQDLTLLKALVRQQLPEKYKEIFFDQSKNGYAGYIDGGASQEEFYKFIKPILEKMDGTEELLVKLNREDLLRKQRTFDNGSIPHQIHLGELHAILRRQEDFYPFLKDNREKIEKILTFRIPYYVGPLARGNSRFAWMTRKSEETITPWNFEEVVDKGASAQSFIERMTNFDKNLPNEKVLPKHSLLYEYFTVYNELTKVKYVTEGMRKPAFLSGEQKKAIVDLLFKTNRKVTVKQLKEDYFKKIECFDSVEISGVEDRFNASLGTYHDLLKIIKDKDFLDNEENEDILEDIVLTLTLFEDREMIEERLKTYAHLFDDKVMKQLKRRRYTGWGRLSRKLINGIRDKQSGKTILDFLKSDGFANRNFMQLIHDDSLTFKEDIQKAQVSGQGDSLHEHIANLAGSPAIKKGILQTVKVVDELVKVMGRHKPENIVIEMARENQTTQKGQKNSRERMKRIEEGIKELGSQILKEHPVENTQLQNEKLYLYYLQNGRDMYVDQELDINRLSDYDVDHIVPQSFLKDDSIDNKVLTRSDKNRGKSDNVPSEEVVKKMKNYWRQLLNAKLITQRKFDNLTKAERGGLSELDKAGFIKRQLVETRQITKHVAQILDSRMNTKYDENDKLIREVKVITLKSKLVSDFRKDFQFYKVREINNYHHAHDAYLNAVVGTALIKKYPKLESEFVYGDYKVYDVRKMIAKSEQEIGKATAKYFFYSNIMNFFKTEITLANGEIRKRPLIETNGETGEIVWDKGRDFATVRKVLSMPQVNIVKKTEVQTGGFSKESILPKRNSDKLIARKKDWDPKKYGGFDSPTVAYSVLVVAKVEKGKSKKLKSVKELLGITIMERSSFEKNPIDFLEAKGYKEVKKDLIIKLPKYSLFELENGRKRMLASAGELQKGNELALPSKYVNFLYLASHYEKLKGSPEDNEQKQLFVEQHKHYLDEIIEQISEFSKRVILADANLDKVLSAYNKHRDKPIREQAENIIHLFTLTNLGAPAAFKYFDTTIDRKRYTSTKEVLDATLIHQSITGLYETRIDLSQLGGDSGGSPKKKRKV

SEQ ID NO: 176 - protein, 1561 aa, Artificial Sequence
  Synthetic
MSEVEFSHEYWMRHALTLAKRAWDEREVPVGAVLVHNNRVIGEGWNRPIGRHDPTAHAEIMALRQGGLVMQNYRLIDATLYVTLEPCVMCAGAMIHSRIGRVVFGARGAKTGAAGSLMDVLHHPGMNHRVEITEGILADECAALLSDFFRMRRQEIKAQKKAQSSTDSGSETPGTSESATPESDKKYSIGLAIGTNSVGWAVITDEYKVPSKKFKVLGNTDRHSIKKNLIGALLFDSGETAEATRLKRTARRRYTRRKNRICYLQEIFSNEMAKVDDSFFHRLEESFLVEEDKKHERHPIFGNIVDEVAYHEKYPTIYHLRKKLVDSTDKADLRLIYLALAHMIKFRGHFLIEGDLNPDNSDVDKLFIQLVQTYNQLFEENPINASGVDAKAILSARLSKSRRLENLIAQLPGEKKNGLFGNLIALSLGLTPNFKSNFDLAEDAKLQLSKDTYDDDLDNLLAQIGDQYADLFLAAKNLSDAILLSDILRVNTEITKAPLSASMIKRYDEHHQDLTLLKALVRQQLPEKYKEIFFDQSKNGYAGYIDGGASQEEFYKFIKPILEKMDGTEELLVKLNREDLLRKQRTFDNGSIPHQIHLGELHAILRRQEDFYPFLKDNREKIEKILTFRIPYYVGPLARGNSRFAWMTRKSEETITPWNFEEVVDKGASAQSFIERMTNFDKNLPNEKVLPKHSLLYEYFTVYNELTKVKYVTEGMRKPAFLSGEQKKAIVDLLFKTNRKVTVKQLKEDYFKKIECFDSVEISGVEDRFNASLGTYHDLLKIIKDKDFLDNEENEDILEDIVLTLTLFEDREMIEERLKTYAHLFDDKVMKQLKRRRYTGWGRLSRKLINGIRDKQSGKTILDFLKSDGFANRNFMQLIHDDSLTFKEDIQKAQVSGQGDSLHEHIANLAGSPAIKKGILQTVKVVDELVKVMGRHKPENIVIEMARENQTTQKGQKNSRERMKRIEEGIKELGSQILKEHPVENTQLQNEKLYLYYLQNGRDMYVDQELDINRLSDYDVDHIVPQSFLKDDSIDNKVLTRSDKNRGKSDNVPSEEVVKKMKNYWRQLLNAKLITQRKFDNLTKAERGGLSELDKAGFIKRQLVETRQITKHVAQILDSRMNTKYDENDKLIREVKVITLKSKLVSDFRKDFQFYKVREINNYHHAHDAYLNAVVGTALIKKYPKLESEFVYGDYKVYDVRKMIAKSEQEIGKATAKYFFYSNIMNFFKTEITLANGEIRKRPLIETNGETGEIVWDKGRDFATVRKVLSMPQVNIVKKTEVQTGGFSKESILPKRNSDKLIARKKDWDPKKYGGFDSPTVAYSVLVVAKVEKGKSKKLKSVKELLGITIMERSSFEKNPIDFLEAKGYKEVKKDLIIKLPKYSLFELENGRKRMLASAGELQKGNELALPSKYVNFLYLASHYEKLKGSPEDNEQKQLFVEQHKHYLDEIIEQISEFSKRVILADANLDKVLSAYNKHRDKPIREQAENIIHLFTLTNLGAPAAFKYFDTTIDRKRYTSTKEVLDATLIHQSITGLYETRIDLSQLGGDSGGSPKKKRKV

SEQ ID NO: 177 - protein, 1561 aa, Artificial Sequence
  Synthetic
MSEVEFSHEYWMRHALTLAKRAWDEREVPVGAVLVHNNRVIGEGWNRPIGRHDPTAHAEIMALRQGGLVMQNYRLIDATLYVTLEPCVMCAGAMIHSRIGRVVFGARVAKTGAAGSLMDVLHHPGMNHRVEITEGILADECAALLSDFFRMRRQEIKAQKKAQSSTDSGSETPGTSESATPESDKKYSIGLAIGTNSVGWAVITDEYKVPSKKFKVLGNTDRHSIKKNLIGALLFDSGETAEATRLKRTARRRYTRRKNRICYLQEIFSNEMAKVDDSFFHRLEESFLVEEDKKHERHPIFGNIVDEVAYHEKYPTIYHLRKKLVDSTDKADLRLIYLALAHMIKFRGHFLIEGDLNPDNSDVDKLFIQLVQTYNQLFEENPINASGVDAKAILSARLSKSRRLENLIAQLPGEKKNGLFGNLIALSLGLTPNFKSNFDLAEDAKLQLSKDTYDDDLDNLLAQIGDQYADLFLAAKNLSDAILLSDILRVNTEITKAPLSASMIKRYDEHHQDLTLLKALVRQQLPEKYKEIFFDQSKNGYAGYIDGGASQEEFYKFIKPILEKMDGTEELLVKLNREDLLRKQRTFDNGSIPHQIHLGELHAILRRQEDFYPFLKDNREKIEKILTFRIPYYVGPLARGNSRFAWMTRKSEETITPWNFEEVVDKGASAQSFIERMTNFDKNLPNEKVLPKHSLLYEYFTVYNELTKVKYVTEGMRKPAFLSGEQKKAIVDLLFKTNRKVTVKQLKEDYFKKIECFDSVEISGVEDRFNASLGTYHDLLKIIKDKDFLDNEENEDILEDIVLTLTLFEDREMIEERLKTYAHLFDDKVMKQLKRRRYTGWGRLSRKLINGIRDKQSGKTILDFLKSDGFANRNFMQLIHDDSLTFKEDIQKAQVSGQGDSLHEHIANLAGSPAIKKGILQTVKVVDELVKVMGRHKPENIVIEMARENQTTQKGQKNSRERMKRIEEGIKELGSQILKEHPVENTQLQNEKLYLYYLQNGRDMYVDQELDINRLSDYDVDHIVPQSFLKDDSIDNKVLTRSDKNRGKSDNVPSEEVVKKMKNYWRQLLNAKLITQRKFDNLTKAERGGLSELDKAGFIKRQLVETRQITKHVAQILDSRMNTKYDENDKLIREVKVITLKSKLVSDFRKDFQFYKVREINNYHHAHDAYLNAVVGTALIKKYPKLESEFVYGDYKVYDVRKMIAKSEQEIGKATAKYFFYSNIMNFFKTEITLANGEIRKRPLIETNGETGEIVWDKGRDFATVRKVLSMPQVNIVKKTEVQTGGFSKESILPKRNSDKLIARKKDWDPKKYGGFDSPTVAYSVLVVAKVEKGKSKKLKSVKELLGITIMERSSFEKNPIDFLEAKGYKEVKKDLIIKLPKYSLFELENGRKRMLASAGELQKGNELALPSKYVNFLYLASHYEKLKGSPEDNEQKQLFVEQHKHYLDEIIEQISEFSKRVILADANLDKVLSAYNKHRDKPIREQAENIIHLFTLTNLGAPAAFKYFDTTIDRKRYTSTKEVLDATLIHQSITGLYETRIDLSQLGGDSGGSPKKKRKV

SEQ ID NO: 178 - protein, 1550 aa, Artificial Sequence
  Synthetic
MSEVEFSYEYWMRHALTLAKRAWDEREVPVGAVLVHNNRVIGEGWNRPIGRHDPTAHAEIMALRQGGLVMQNYRLIDATLYVTLEPCVMCAGAMIHSRIGRVVFGARNAKTGAAGSLMDVLHHPGMSHRVEITEGILADECAALLSDFFRMRRQEIKAQKKAQSSTDSGSETPGTSESATPESDKKYSIGLAIGTNSVGWAVITDEYKVPSKKFKVLGNTDRHSIKKNLIGALLFDSGETAEATRLKRTARRRYTRRKNRICYLQEIFSNEMAKVDDSFFHRLEESFLVEEDKKHERHPIFGNIVDEVAYHEKYPTIYHLRKKLVDSTDKADLRLIYLALAHMIKFRGHFLIEGDLNPDNSDVDKLFIQLVQTYNQLFEENPINASGVDAKAILSARLSKSRRLENLIAQLPGEKKNGLFGNLIALSLGLTPNFKSNFDLAEDAKLQLSKDTYDDDLDNLLAQIGDQYADLFLAAKNLSDAILLSDILRVNTEITKAPLSASMIKRYDEHHQDLTLLKALVRQQLPEKYKEIFFDQSKNGYAGYIDGGASQEEFYKFIKPILEKMDGTEELLVKLNREDLLRKQRTFDNGSIPHQIHLGELHAILRRQEDFYPFLKDNREKIEKILTFRIPYYVGPLARGNSRFAWMTRKSEETITPWNFEEVVDKGASAQSFIERMTNFDKNLPNEKVLPKHSLLYEYFTVYNELTKVKYVTEGMRKPAFLSGEQKKAIVDLLFKTNRKVTVKQLKEDYFKKIECFDSVEISGVEDRFNASLGTYHDLLKIIKDKDFLDNEENEDILEDIVLTLTLFEDREMIEERLKTYAHLFDDKVMKQLKRRRYTGWGRLSRKLINGIRDKQSGKTILDFLKSDGFANRNFMQLIHDDSLTFKEDIQKAQVSGQGDSLHEHIANLAGSPAIKKGILQTVKVVDELVKVMGRHKPENIVIEMARENQTTQKGQKNSRERMKRIEEGIKELGSQILKEHPVENTQLQNEKLYLYYLQNGRDMYVDQELDINRLSDYDVDAIVPQSFLKDDSIDNKVLTRSDKNRGKSDNVPSEEVVKKMKNYWRQLLNAKLITQRKFDNLTKAERGGLSELDKAGFIKRQLVETRQITKHVAQILDSRMNTKYDENDKLIREVKVITLKSKLVSDFRKDFQFYKVREINNYHHAHDAYLNAVVGTALIKKYPKLESEFVYGDYKVYDVRKMIAKSEQEIGKATAKYFFYSNIMNFFKTEITLANGEIRKRPLIETNGETGEIVWDKGRDFATVRKVLSMPQVNIVKKTEVQTGGFSKESILPKRNSDKLIARKKDWDPKKYGGFDSPTVAYSVLVVAKVEKGKSKKLKSVKELLGITIMERSSFEKNPIDFLEAKGYKEVKKDLIIKLPKYSLFELENGRKRMLASAGELQKGNELALPSKYVNFLYLASHYEKLKGSPEDNEQKQLFVEQHKHYLDEIIEQISEFSKRVILADANLDKVLSAYNKHRDKPIREQAENIIHLFTLTNLGAPAAFKYFDTTIDRKRYTSTKEVLDATLIHQSITGLYETRIDLSQLGGD

SEQ ID NO: 179 - protein, 1550 aa, Artificial Sequence
  Synthetic
  misc_feature (155)..(155): Xaa can be any naturally occurring amino acid
MSEVEFSYEYWMRHALTLAKRAWDEREVPVGAVLVHNNRVIGEGWNRPIGRHDPTAHAEIMALRQGGLVMQNYRLIDATLYVTLEPCVMCAGAMIHSRIGRVVFGARNAKTGAAGSLMDVLHHPGMSHRVEITEGILADECAALLSDFFRMRRQXIKAQKKAQSSTDSGSETPGTSESATPESDKKYSIGLAIGTNSVGWAVITDEYKVPSKKFKVLGNTDRHSIKKNLIGALLFDSGETAEATRLKRTARRRYTRRKNRICYLQEIFSNEMAKVDDSFFHRLEESFLVEEDKKHERHPIFGNIVDEVAYHEKYPTIYHLRKKLVDSTDKADLRLIYLALAHMIKFRGHFLIEGDLNPDNSDVDKLFIQLVQTYNQLFEENPINASGVDAKAILSARLSKSRRLENLIAQLPGEKKNGLFGNLIALSLGLTPNFKSNFDLAEDAKLQLSKDTYDDDLDNLLAQIGDQYADLFLAAKNLSDAILLSDILRVNTEITKAPLSASMIKRYDEHHQDLTLLKALVRQQLPEKYKEIFFDQSKNGYAGYIDGGASQEEFYKFIKPILEKMDGTEELLVKLNREDLLRKQRTFDNGSIPHQIHLGELHAILRRQEDFYPFLKDNREKIEKILTFRIPYYVGPLARGNSRFAWMTRKSEETITPWNFEEVVDKGASAQSFIERMTNFDKNLPNEKVLPKHSLLYEYFTVYNELTKVKYVTEGMRKPAFLSGEQKKAIVDLLFKTNRKVTVKQLKEDYFKKIECFDSVEISGVEDRFNASLGTYHDLLKIIKDKDFLDNEENEDILEDIVLTLTLFEDREMIEERLKTYAHLFDDKVMKQLKRRRYTGWGRLSRKLINGIRDKQSGKTILDFLKSDGFANRNFMQLIHDDSLTFKEDIQKAQVSGQGDSLHEHIANLAGSPAIKKGILQTVKVVDELVKVMGRHKPENIVIEMARENQTTQKGQKNSRERMKRIEEGIKELGSQILKEHPVENTQLQNEKLYLYYLQNGRDMYVDQELDINRLSDYDVDAIVPQSFLKDDSIDNKVLTRSDKNRGKSDNVPSEEVVKKMKNYWRQLLNAKLITQRKFDNLTKAERGGLSELDKAGFIKRQLVETRQITKHVAQILDSRMNTKYDENDKLIREVKVITLKSKLVSDFRKDFQFYKVREINNYHHAHDAYLNAVVGTALIKKYPKLESEFVYGDYKVYDVRKMIAKSEQEIGKATAKYFFYSNIMNFFKTEITLANGEIRKRPLIETNGETGEIVWDKGRDFATVRKVLSMPQVNIVKKTEVQTGGFSKESILPKRNSDKLIARKKDWDPKKYGGFDSPTVAYSVLVVAKVEKGKSKKLKSVKELLGITIMERSSFEKNPIDFLEAKGYKEVKKDLIIKLPKYSLFELENGRKRMLASAGELQKGNELALPSKYVNFLYLASHYEKLKGSPEDNEQKQLFVEQHKHYLDEIIEQISEFSKRVILADANLDKVLSAYNKHRDKPIREQAENIIHLFTLTNLGAPAAFKYFDTTIDRKRYTSTKEVLDATLIHQSITGLYETRIDLSQLGGD

SEQ ID NO: 180 - protein, 1775 aa, Artificial Sequence
  Synthetic
MSEVEFSHEYWMRHALTLAKRAWDEREVPVGAVLVHNNRVIGEGWNRPIGRHDPTAHAEIMALRQGGLVMQNYRLIDATLYVTLEPCVMCAGAMIHSRIGRVVFGARDAKTGAAGSLMDVLHHPGMNHRVEITEGILADECAALLSDFFRMRRQEIKAQKKAQSSTDSGGSSGGSSGSETPGTSESATPESSGGSSGGSSEVEFSHEYWMRHALTLAKRALDEREVPVGAVLVLNNRVIGEGWNRAIGLHDPTAHAEIMALRQGGLVMQNYRLIDATLYVTFEPCVMCAGAMIHSRIGRVVFGVRNAKTGAAGSLMDVLHYPGMNHRVEITEGILADECAALLCYFFRMPRQVFNAQKKAQSSTDSGGSSGGSSGSETPGTSESATPESSGGSSGGSDKKYSIGLAIGTNSVGWAVITDEYKVPSKKFKVLGNTDRHSIKKNLIGALLFDSGETAEATRLKRTARRRYTRRKNRICYLQEIFSNEMAKVDDSFFHRLEESFLVEEDKKHERHPIFGNIVDEVAYHEKYPTIYHLRKKLVDSTDKADLRLIYLALAHMIKFRGHFLIEGDLNPDNSDVDKLFIQLVQTYNQLFEENPINASGVDAKAILSARLSKSRRLENLIAQLPGEKKNGLFGNLIALSLGLTPNFKSNFDLAEDAKLQLSKDTYDDDLDNLLAQIGDQYADLFLAAKNLSDAILLSDILRVNTEITKAPLSASMIKRYDEHHQDLTLLKALVRQQLPEKYKEIFFDQSKNGYAGYIDGGASQEEFYKFIKPILEKMDGTEELLVKLNREDLLRKQRTFDNGSIPHQIHLGELHAILRRQEDFYPFLKDNREKIEKILTFRIPYYVGPLARGNSRFAWMTRKSEETITPWNFEEVVDKGASAQSFIERMTNFDKNLPNEKVLPKHSLLYEYFTVYNELTKVKYVTEGMRKPAFLSGEQKKAIVDLLFKTNRKVTVKQLKEDYFKKIECFDSVEISGVEDRFNASLGTYHDLLKIIKDKDFLDNEENEDILEDIVLTLTLFEDREMIEERLKTYAHLFDDKVMKQLKRRRYTGWGRLSRKLINGIRDKQSGKTILDFLKSDGFANRNFMQLIHDDSLTFKEDIQKAQVSGQGDSLHEHIANLAGSPAIKKGILQTVKVVDELVKVMGRHKPENIVIEMARENQTTQKGQKNSRERMKRIEEGIKELGSQILKEHPVENTQLQNEKLYLYYLQNGRDMYVDQELDINRLSDYDVDHIVPQSFLKDDSIDNKVLTRSDKNRGKSDNVPSEEVVKKMKNYWRQLLNAKLITQRKFDNLTKAERGGLSELDKAGFIKRQLVETRQITKHVAQILDSRMNTKYDENDKLIREVKVITLKSKLVSDFRKDFQFYKVREINNYHHAHDAYLNAVVGTALIKKYPKLESEFVYGDYKVYDVRKMIAKSEQEIGKATAKYFFYSNIMNFFKTEITLANGEIRKRPLIETNGETGEIVWDKGRDFATVRKVLSMPQVNIVKKTEVQTGGFSKESILPKRNSDKLIARKKDWDPKKYGGFDSPTVAYSVLVVAKVEKGKSKKLKSVKELLGITIMERSSFEKNPIDFLEAKGYKEVKKDLIIKLPKYSLFELENGRKRMLASAGELQKGNELALPSKYVNFLYLASHYEKLKGSPEDNEQKQLFVEQHKHYLDEIIEQISEFSKRVILADANLDKVLSAYNKHRDKPIREQAENIIHLFTLTNLGAPAAFKYFDTTIDRKRYTSTKEVLDATLIHQSITGLYETRIDLSQLGGDSGGSPKKKRKV

SEQ ID NO: 181 - protein, 1767 aa, Artificial Sequence
  Synthetic
MSEVEFSHEYWMRHALTLAKRAWDEREVPVGAVLVHNNRVIGEGWNRPIGRHDPTAHAEIMALRQGGLVMQNYRLIDATLYVTLEPCVMCAGAMIHSRIGRVVFGARDAKTGAAGSLMDVLHHPGMNHRVEITEGILADECAALLSDFFRMRRQEIKAQKKAQSSTDSGGSSGGSSGSETPGTSESATPESSGGSSGGSSEVEFSHEYWMRHALTLAKRARDEREVPVGAVLVLNNRVIGEGWNRAIGLHDPTAHAEIMALRQGGLVMQNYRLIDATLYVTFEPCVMCAGAMIHSRIGRVVFGVRNAKTGAAGSLMDVLHYPGMNHRVEITEGILADECAALLCYFFRMPRQVFNAQKKAQSSTDSGGSSGGSSGSETPGTSESATPESDKKYSIGLAIGTNSVGWAVITDEYKVPSKKFKVLGNTDRHSIKKNLIGALLFDSGETAEATRLKRTARRRYTRRKNRICYLQEIFSNEMAKVDDSFFHRLEESFLVEEDKKHERHPIFGNIVDEVAYHEKYPTIYHLRKKLVDSTDKADLRLIYLALAHMIKFRGHFLIEGDLNPDNSDVDKLFIQLVQTYNQLFEENPINASGVDAKAILSARLSKSRRLENLIAQLPGEKKNGLFGNLIALSLGLTPNFKSNFDLAEDAKLQLSKDTYDDDLDNLLAQIGDQYADLFLAAKNLSDAILLSDILRVNTEITKAPLSASMIKRYDEHHQDLTLLKALVRQQLPEKYKEIFFDQSKNGYAGYIDGGASQEEFYKFIKPILEKMDGTEELLVKLNREDLLRKQRTFDNGSIPHQIHLGELHAILRRQEDFYPFLKDNREKIEKILTFRIPYYVGPLARGNSRFAWMTRKSEETITPWNFEEVVDKGASAQSFIERMTNFDKNLPNEKVLPKHSLLYEYFTVYNELTKVKYVTEGMRKPAFLSGEQKKAIVDLLFKTNRKVTVKQLKEDYFKKIECFDSVEISGVEDRFNASLGTYHDLLKIIKDKDFLDNEENEDILEDIVLTLTLFEDREMIEERLKTYAHLFDDKVMKQLKRRRYTGWGRLSRKLINGIRDKQSGKTILDFLKSDGFANRNFMQLIHDDSLTFKEDIQKAQVSGQGDSLHEHIANLAGSPAIKKGILQTVKVVDELVKVMGRHKPENIVIEMARENQTTQKGQKNSRERMKRIEEGIKELGSQILKEHPVENTQLQNEKLYLYYLQNGRDMYVDQELDINRLSDYDVDHIVPQSFLKDDSIDNKVLTRSDKNRGKSDNVPSEEVVKKMKNYWRQLLNAKLITQRKFDNLTKAERGGLSELDKAGFIKRQLVETRQITKHVAQILDSRMNTKYDENDKLIREVKVITLKSKLVSDFRKDFQFYKVREINNYHHAHDAYLNAVVGTALIKKYPKLESEFVYGDYKVYDVRKMIAKSEQEIGKATAKYFFYSNIMNFFKTEITLANGEIRKRPLIETNGETGEIVWDKGRDFATVRKVLSMPQVNIVKKTEVQTGGFSKESILPKRNSDKLIARKKDWDPKKYGGFDSPTVAYSVLVVAKVEKGKSKKLKSVKELLGITIMERSSFEKNPIDFLEAKGYKEVKKDLIIKLPKYSLFELENGRKRMLASAGELQKGNELALPSKYVNFLYLASHYEKLKGSPEDNEQKQLFVEQHKHYLDEIIEQISEFSKRVILADANLDKVLSAYNKHRDKPIREQAENIIHLFTLTNLGAPAAFKYFDTTIDRKRYTSTKEVLDATLIHQSITGLYETRIDLSQLGGDSGGSPKKKRKV

SEQ ID NO: 182 - protein, 1775 aa, Artificial Sequence
  Synthetic
MSEVEFSHEYWMRHALTLAKRAWDEREVPVGAVLVHNNRVIGEGWNRPIGRHDPTAHAEIMALRQGGLVMQNYRLIDATLYVTLEPCVMCAGAMIHSRIGRVVFGARDAKTGAAGSLMDVLHHPGMNHRVEITEGILADECAALLSDFFRMRRQEIKAQKKAQSSTDSGGSSGGSSGSETPGTSESATPESSGGSSGGSSEVEFSHEYWMRHALTLAKRAWDEREVPVGAVLVHNNRVIGEGWNRPIGRHDPTAHAEIMALRQGGLVMQNYRLIDATLYVTFEPCVMCAGAMIHSRIGRVVFGVRNAKTGAAGSLMDVLHYPGMNHRVEITEGILADECAALLSYFFRMRRQVFKAQKKAQSSTDSGGSSGGSSGSETPGTSESATPESSGGSSGGSDKKYSIGLAIGTNSVGWAVITDEYKVPSKKFKVLGNTDRHSIKKNLIGALLFDSGETAEATRLKRTARRRYTRRKNRICYLQEIFSNEMAKVDDSFFHRLEESFLVEEDKKHERHPIFGNIVDEVAYHEKYPTIYHLRKKLVDSTDKADLRLIYLALAHMIKFRGHFLIEGDLNPDNSDVDKLFIQLVQTYNQLFEENPINASGVDAKAILSARLSKSRRLENLIAQLPGEKKNGLFGNLIALSLGLTPNFKSNFDLAEDAKLQLSKDTYDDDLDNLLAQIGDQYADLFLAAKNLSDAILLSDILRVNTEITKAPLSASMIKRYDEHHQDLTLLKALVRQQLPEKYKEIFFDQSKNGYAGYIDGGASQEEFYKFIKPILEKMDGTEELLVKLNREDLLRKQRTFDNGSIPHQIHLGELHAILRRQEDFYPFLKDNREKIEKILTFRIPYYVGPLARGNSRFAWMTRKSEETITPWNFEEVVDKGASAQSFIERMTNFDKNLPNEKVLPKHSLLYEYFTVYNELTKVKYVTEGMRKPAFLSGEQKKAIVDLLFKTNRKVTVKQLKEDYFKKIECFDSVEISGVEDRFNASLGTYHDLLKIIKDKDFLDNEENEDILEDIVLTLTLFEDREMIEERLKTYAHLFDDKVMKQLKRRRYTGWGRLSRKLINGIRDKQSGKTILDFLKSDGFANRNFMQLIHDDSLTFKEDIQKAQVSGQGDSLHEHIANLAGSPAIKKGILQTVKVVDELVKVMGRHKPENIVIEMARENQTTQKGQKNSRERMKRIEEGIKELGSQILKEHPVENTQLQNEKLYLYYLQNGRDMYVDQELDINRLSDYDVDHIVPQSFLKDDSIDNKVLTRSDKNRGKSDNVPSEEVVKKMKNYWRQLLNAKLITQRKFDNLTKAERGGLSELDKAGFIKRQLVETRQITKHVAQILDSRMNTKYDENDKLIREVKVITLKSKLVSDFRKDFQFYKVREINNYHHAHDAYLNAVVGTALIKKYPKLESEFVYGDYKVYDVRKMIAKSEQEIGKATAKYFFYSNIMNFFKTEITLANGEIRKRPLIETNGETGEIVWDKGRDFATVRKVLSMPQVNIVKKTEVQTGGFSKESILPKRNSDKLIARKKDWDPKKYGGFDSPTVAYSVLVVAKVEKGKSKKLKSVKELLGITIMERSSFEKNPIDFLEAKGYKEVKKDLIIKLPKYSLFELENGRKRMLASAGELQKGNELALPSKYVNFLYLASHYEKLKGSPEDNEQKQLFVEQHKHYLDEIIEQISEFSKRVILADANLDKVLSAYNKHRDKPIREQAENIIHLFTLTNLGAPAAFKYFDTTIDRKRYTSTKEVLDATLIHQSITGLYETRIDLSQLGGDSGGSPKKKRKV

SEQ ID NO: 183 - protein, 1775 aa, Artificial Sequence
  Synthetic
MSEVEFSHEYWMRHALTLAKRAWDEREVPVGAVLVHNNRVIGEGWNRPIGRHDPTAHAEIMALRQGGLVMQNYRLIDATLYVTLEPCVMCAGAMIHSRIGRVVFGARDAKTGAAGSLMDVLHHPGMNHRVEITEGILADECAALLSDFFRMRRQEIKAQKKAQSSTDSGGSSGGSSGSETPGTSESATPESSGGSSGGSSEVEFSHEYWMRHALTLAKRAWDEREVPVGAVLVLNNRVIGEGWNRPIGLHDPTAHAEIMALRQGGLVMQNYRLIDATLYVTFEPCVMCAGAMIHSRIGRVVFGVRNAKTGAAGSLMDVLHYPGMNHRVEITEGILADECAALLCYFFRMRRQVFNAQKKAQSSTDSGGSSGGSSGSETPGTSESATPESSGGSSGGSDKKYSIGLAIGTNSVGWAVITDEYKVPSKKFKVLGNTDRHSIKKNLIGALLFDSGETAEATRLKRTARRRYTRRKNRICYLQEIFSNEMAKVDDSFFHRLEESFLVEEDKKHERHPIFGNIVDEVAYHEKYPTIYHLRKKLVDSTDKADLRLIYLALAHMIKFRGHFLIEGDLNPDNSDVDKLFIQLVQTYNQLFEENPINASGVDAKAILSARLSKSRRLENLIAQLPGEKKNGLFGNLIALSLGLTPNFKSNFDLAEDAKLQLSKDTYDDDLDNLLAQIGDQYADLFLAAKNLSDAILLSDILRVNTEITKAPLSASMIKRYDEHHQDLTLLKALVRQQLPEKYKEIFFDQSKNGYAGYIDGGASQEEFYKFIKPILEKMDGTEELLVKLNREDLLRKQRTFDNGSIPHQIHLGELHAILRRQEDFYPFLKDNREKIEKILTFRIPYYVGPLARGNSRFAWMTRKSEETITPWNFEEVVDKGASAQSFIERMTNFDKNLPNEKVLPKHSLLYEYFTVYNELTKVKYVTEGMRKPAFLSGEQKKAIVDLLFKTNRKVTVKQLKEDYFKKIECFDSVEISGVEDRFNASLGTYHDLLKIIKDKDFLDNEENEDILEDIVLTLTLFEDREMIEERLKTYAHLFDDKVMKQLKRRRYTGWGRLSRKLINGIRDKQSGKTILDFLKSDGFANRNFMQLIHDDSLTFKEDIQKAQVSGQGDSLHEHIANLAGSPAIKKGILQTVKVVDELVKVMGRHKPENIVIEMARENQTTQKGQKNSRERMKRIEEGIKELGSQILKEHPVENTQLQNEKLYLYYLQNGRDMYVDQELDINRLSDYDVDHIVPQSFLKDDSIDNKVLTRSDKNRGKSDNVPSEEVVKKMKNYWRQLLNAKLITQRKFDNLTKAERGGLSELDKAGFIKRQLVETRQITKHVAQILDSRMNTKYDENDKLIREVKVITLKSKLVSDFRKDFQFYKVREINNYHHAHDAYLNAVVGTALIKKYPKLESEFVYGDYKVYDVRKMIAKSEQEIGKATAKYFFYSNIMNFFKTEITLANGEIRKRPLIETNGETGEIVWDKGRDFATVRKVLSMPQVNIVKKTEVQTGGFSKESILPKRNSDKLIARKKDWDPKKYGGFDSPTVAYSVLVVAKVEKGKSKKLKSVKELLGITIMERSSFEKNPIDFLEAKGYKEVKKDLIIKLPKYSLFELENGRKRMLASAGELQKGNELALPSKYVNFLYLASHYEKLKGSPEDNEQKQLFVEQHKHYLDEIIEQISEFSKRVILADANLDKVLSAYNKHRDKPIREQAENIIHLFTLTNLGAPAAFKYFDTTIDRKRYTSTKEVLDATLIHQSITGLYETRIDLSQLGGDSGGSPKKKRKV

SEQ ID NO: 184 - protein, 1767 aa, Artificial Sequence
  Synthetic
MSEVEFSHEYWMRHALTLAKRAWDEREVPVGAVLVHNNRVIGEGWNRPIGRHDPTAHAEIMALRQGGLVMQNYRLIDATLYVTLEPCVMCAGAMIHSRIGRVVFGARDAKTGAAGSLMDVLHHPGMNHRVEITEGILADECAALLSDFFRMRRQEIKAQKKAQSSTDSGGSSGGSSGSETPGTSESATPESSGGSSGGSSEVEFSHEYWMRHALTLAKRAWDEREVPVGAVLVLNNRVIGEGWNRPIGLHDPTAHAEIMALRQGGLVMQNYRLIDATLYVTFEPCVMCAGAMIHSRIGRVVFGVRNAKTGAAGSLMDVLHYPGMNHRVEITEGILADECAALLCYFFRMRRQVFNAQKKAQSSTDSGGSSGGSSGSETPGTSESATPESDKKYSIGLAIGTNSVGWAVITDEYKVPSKKFKVLGNTDRHSIKKNLIGALLFDSGETAEATRLKRTARRRYTRRKNRICYLQEIFSNEMAKVDDSFFHRLEESFLVEEDKKHERHPIFGNIVDEVAYHEKYPTIYHLRKKLVDSTDKADLRLIYLALAHMIKFRGHFLIEGDLNPDNSDVDKLFIQLVQTYNQLFEENPINASGVDAKAILSARLSKSRRLENLIAQLPGEKKNGLFGNLIALSLGLTPNFKSNFDLAEDAKLQLSKDTYDDDLDNLLAQIGDQYADLFLAAKNLSDAILLSDILRVNTEITKAPLSASMIKRYDEHHQDLTLLKALVRQQLPEKYKEIFFDQSKNGYAGYIDGGASQEEFYKFIKPILEKMDGTEELLVKLNREDLLRKQRTFDNGSIPHQIHLGELHAILRRQEDFYPFLKDNREKIEKILTFRIPYYVGPLARGNSRFAWMTRKSEETITPWNFEEVVDKGASAQSFIERMTNFDKNLPNEKVLPKHSLLYEYFTVYNELTKVKYVTEGMRKPAFLSGEQKKAIVDLLFKTNRKVTVKQLKEDYFKKIECFDSVEISGVEDRFNASLGTYHDLLKIIKDKDFLDNEENEDILEDIVLTLTLFEDREMIEERLKTYAHLFDDKVMKQLKRRRYTGWGRLSRKLINGIRDKQSGKTILDFLKSDGFANRNFMQLIHDDSLTFKEDIQKAQVSGQGDSLHEHIANLAGSPAIKKGILQTVKVVDELVKVMGRHKPENIVIEMARENQTTQKGQKNSRERMKRIEEGIKELGSQILKEHPVENTQLQNEKLYLYYLQNGRDMYVDQELDINRLSDYDVDHIVPQSFLKDDSIDNKVLTRSDKNRGKSDNVPSEEVVKKMKNYWRQLLNAKLITQRKFDNLTKAERGGLSELDKAGFIKRQLVETRQITKHVAQILDSRMNTKYDENDKLIREVKVITLKSKLVSDFRKDFQFYKVREINNYHHAHDAYLNAVVGTALIKKYPKLESEFVYGDYKVYDVRKMIAKSEQEIGKATAKYFFYSNIMNFFKTEITLANGEIRKRPLIETNGETGEIVWDKGRDFATVRKVLSMPQVNIVKKTEVQTGGFSKESILPKRNSDKLIARKKDWDPKKYGGFDSPTVAYSVLVVAKVEKGKSKKLKSVKELLGITIMERSSFEKNPIDFLEAKGYKEVKKDLIIKLPKYSLFELENGRKRMLASAGELQKGNELALPSKYVNFLYLASHYEKLKGSPEDNEQKQLFVEQHKHYLDEIIEQISEFSKRVILADANLDKVLSAYNKHRDKPIREQAENIIHLFTLTNLGAPAAFKYFDTTIDRKRYTSTKEVLDATLIHQSITGLYETRIDLSQLGGDSGGSPKKKRKV

SEQ ID NO: 185 - protein, 1775 aa, Artificial Sequence
  Synthetic
MSEVEFSHEYWMRHALTLAKRAWDEREVPVGAVLVHNNRVIGEGWNRPIGRHDPTAHAEIMALRQGGLVMQNYRLIDATLYVTLEPCVMCAGAMIHSRIGRVVFGARDAKTGAAGSLMDVLHHPGMNHRVEITEGILADECAALLSDFFRMRRQEIKAQKKAQSSTDSGGSSGGSSGSETPGTSESATPESSGGSSGGSSEVEFSHEYWMRHALTLAKRAWDEREVPVGAVLVLNNRVIGEGWNRSIGLHDPTAHAEIMALRQGGLVMQNYRLIDATLYVTFEPCVMCAGAMIHSRIGRVVFGVRNAKTGAAGSLMDVLHYPGMNHRVEITEGILADECAALLCYFFRMRRQVFNAQKKAQSSTDSGGSSGGSSGSETPGTSESATPESSGGSSGGSDKKYSIGLAIGTNSVGWAVITDEYKVPSKKFKVLGNTDRHSIKKNLIGALLFDSGETAEATRLKRTARRRYTRRKNRICYLQEIFSNEMAKVDDSFFHRLEESFLVEEDKKHERHPIFGNIVDEVAYHEKYPTIYHLRKKLVDSTDKADLRLIYLALAHMIKFRGHFLIEGDLNPDNSDVDKLFIQLVQTYNQLFEENPINASGVDAKAILSARLSKSRRLENLIAQLPGEKKNGLFGNLIALSLGLTPNFKSNFDLAEDAKLQLSKDTYDDDLDNLLAQIGDQYADLFLAAKNLSDAILLSDILRVNTEITKAPLSASMIKRYDEHHQDLTLLKALVRQQLPEKYKEIFFDQSKNGYAGYIDGGASQEEFYKFIKPILEKMDGTEELLVKLNREDLLRKQRTFDNGSIPHQIHLGELHAILRRQEDFYPFLKDNREKIEKILTFRIPYYVGPLARGNSRFAWMTRKSEETITPWNFEEVVDKGASAQSFIERMTNFDKNLPNEKVLPKHSLLYEYFTVYNELTKVKYVTEGMRKPAFLSGEQKKAIVDLLFKTNRKVTVKQLKEDYFKKIECFDSVEISGVEDRFNASLGTYHDLLKIIKDKDFLDNEENEDILEDIVLTLTLFEDREMIEERLKTYAHLFDDKVMKQLKRRRYTGWGRLSRKLINGIRDKQSGKTILDFLKSDGFANRNFMQLIHDDSLTFKEDIQKAQVSGQGDSLHEHIANLAGSPAIKKGILQTVKVVDELVKVMGRHKPENIVIEMARENQTTQKGQKNSRERMKRIEEGIKELGSQILKEHPVENTQLQNEKLYLYYLQNGRDMYVDQELDINRLSDYDVDHIVPQSFLKDDSIDNKVLTRSDKNRGKSDNVPSEEVVKKMKNYWRQLLNAKLITQRKFDNLTKAERGGLSELDKAGFIKRQLVETRQITKHVAQILDSRMNTKYDENDKLIREVKVITLKSKLVSDFRKDFQFYKVREINNYHHAHDAYLNAVVGTALIKKYPKLESEFVYGDYKVYDVRKMIAKSEQEIGKATAKYFFYSNIMNFFKTEITLANGEIRKRPLIETNGETGEIVWDKGRDFATVRKVLSMPQVNIVKKTEVQTGGFSKESILPKRNSDKLIARKKDWDPKKYGGFDSPTVAYSVLVVAKVEKGKSKKLKSVKELLGITIMERSSFEKNPIDFLEAKGYKEVKKDLIIKLPKYSLFELENGRKRMLASAGELQKGNELALPSKYVNFLYLASHYEKLKGSPEDNEQKQLFVEQHKHYLDEIIEQISEFSKRVILADANLDKVLSAYNKHRDKPIREQAENIIHLFTLTNLGAPAAFKYFDTTIDRKRYTSTKEVLDATLIHQSITGLYETRIDLSQLGGDSGGSPKKKRKV

SEQ ID NO: 186 - protein, 1775 aa, Artificial Sequence
  Synthetic
MSEVEFSHEYWMRHALTLAKRAWDEREVPVGAVLVHNNRVIGEGWNRPIGRHDPTAHAEIMALRQGGLVMQNYRLIDATLYVTLEPCVMCAGAMIHSRIGRVVFGARDAKTGAAGSLMDVLHHPGMNHRVEITEGILADECAALLSDFFRMRRQEIKAQKKAQSSTDSGGSSGGSSGSETPGTSESATPESSGGSSGGSSEVEFSHEYWMRHALTLAKRAWDEREVPVGAVLVLNNRVIGEGWNRSIGLHDPTAHAEIMALRQGGLVMQNYRLIDATLYVTFEPCVMCAGAMIHSRIGRVVFGVRNAKTGAAGSLMDVLHYPGMNHRVEITEGILADECNALLCYFFRMRRQVFNAQKKAQSSTDSGGSSGGSSGSETPGTSESATPESSGGSSGGSDKKYSIGLAIGTNSVGWAVITDEYKVPSKKFKVLGNTDRHSIKKNLIGALLFDSGETAEATRLKRTARRRYTRRKNRICYLQEIFSNEMAKVDDSFFHRLEESFLVEEDKKHERHPIFGNIVDEVAYHEKYPTIYHLRKKLVDSTDKADLRLIYLALAHMIKFRGHFLIEGDLNPDNSDVDKLFIQLVQTYNQLFEENPINASGVDAKAILSARLSKSRRLENLIAQLPGEKKNGLFGNLIALSLGLTPNFKSNFDLAEDAKLQLSKDTYDDDLDNLLAQIGDQYADLFLAAKNLSDAILLSDILRVNTEITKAPLSASMIKRYDEHHQDLTLLKALVRQQLPEKYKEIFFDQSKNGYAGYIDGGASQEEFYKFIKPILEKMDGTEELLVKLNREDLLRKQRTFDNGSIPHQIHLGELHAILRRQEDFYPFLKDNREKIEKILTFRIPYYVGPLARGNSRFAWMTRKSEETITPWNFEEVVDKGASAQSFIERMTNFDKNLPNEKVLPKHSLLYEYFTVYNELTKVKYVTEGMRKPAFLSGEQKKAIVDLLFKTNRKVTVKQLKEDYFKKIECFDSVEISGVEDRFNASLGTYHDLLKIIKDKDFLDNEENEDILEDIVLTLTLFEDREMIEERLKTYAHLFDDKVMKQLKRRRYTGWGRLSRKLINGIRDKQSGKTILDFLKSDGFANRNFMQLIHDDSLTFKEDIQKAQVSGQGDSLHEHIANLAGSPAIKKGILQTVKVVDELVKVMGRHKPENIVIEMARENQTTQKGQKNSRERMKRIEEGIKELGSQILKEHPVENTQLQNEKLYLYYLQNGRDMYVDQELDINRLSDYDVDHIVPQSFLKDDSIDNKVLTRSDKNRGKSDNVPSEEVVKKMKNYWRQLLNAKLITQRKFDNLTKAERGGLSELDKAGFIKRQLVETRQITKHVAQILDSRMNTKYDENDKLIREVKVITLKSKLVSDFRKDFQFYKVREINNYHHAHDAYLNAVVGTALIKKYPKLESEFVYGDYKVYDVRKMIAKSEQEIGKATAKYFFYSNIMNFFKTEITLANGEIRKRPLIETNGETGEIVWDKGRDFATVRKVLSMPQVNIVKKTEVQTGGFSKESILPKRNSDKLIARKKDWDPKKYGGFDSPTVAYSVLVVAKVEKGKSKKLKSVKELLGITIMERSSFEKNPIDFLEAKGYKEVKKDLIIKLPKYSLFELENGRKRMLASAGELQKGNELALPSKYVNFLYLASHYEKLKGSPEDNEQKQLFVEQHKHYLDEIIEQISEFSKRVILADANLDKVLSAYNKHRDKPIREQAENIIHLFTLTNLGAPAAFKYFDTTIDRKRYTSTKEVLDATLIHQSITGLYETRIDLSQLGGDSGGSPKKKRKV

SEQ ID NO: 187 - protein, 1775 aa, Artificial Sequence
  Synthetic
MSEVEFSHEYWMRHALTLAKRAWDEREVPVGAVLVHNNRVIGEGWNRPIGRHDPTAHAEIMALRQGGLVMQNYRLIDATLYVTLEPCVMCAGAMIHSRIGRVVFGARDAKTGAAGSLMDVLHHPGMNHRVEITEGILADECAALLSDFFRMRRQEIKAQKKAQSSTDSGGSSGGSSGSETPGTSESATPESSGGSSGGSSEVEFSHEYWMRHALTLAKRAWDEREVPVGAVLVLNNRVIGEGWNRAIGLHDPTAHAEIMALRQGGLVMQNYRLIDATLYVTFEPCVMCAGAMIHSRIGRVVFGVRNAKTGAAGSLMDVLHYPGMNHRVEITEGILADECAALLCYFFRMRRQVFNAQKKAQSSTDSGGSSGGSSGSETPGTSESATPESSGGSSGGSDKKYSIGLAIGTNSVGWAVITDEYKVPSKKFKVLGNTDRHSIKKNLIGALLFDSGETAEATRLKRTARRRYTRRKNRICYLQEIFSNEMAKVDDSFFHRLEESFLVEEDKKHERHPIFGNIVDEVAYHEKYPTIYHLRKKLVDSTDKADLRLIYLALAHMIKFRGHFLIEGDLNPDNSDVDKLFIQLVQTYNQLFEENPINASGVDAKAILSARLSKSRRLENLIAQLPGEKKNGLFGNLIALSLGLTPNFKSNFDLAEDAKLQLSKDTYDDDLDNLLAQIGDQYADLFLAAKNLSDAILLSDILRVNTEITKAPLSASMIKRYDEHHQDLTLLKALVRQQLPEKYKEIFFDQSKNGYAGYIDGGASQEEFYKFIKPILEKMDGTEELLVKLNREDLLRKQRTFDNGSIPHQIHLGELHAILRRQEDFYPFLKDNREKIEKILTFRIPYYVGPLARGNSRFAWMTRKSEETITPWNFEEVVDKGASAQSFIERMTNFDKNLPNEKVLPKHSLLYEYFTVYNELTKVKYVTEGMRKPAFLSGEQKKAIVDLLFKTNRKVTVKQLKEDYFKKIECFDSVEISGVEDRFNASLGTYHDLLKIIKDKDFLDNEENEDILEDIVLTLTLFEDREMIEERLKTYAHLFDDKVMKQLKRRRYTGWGRLSRKLINGIRDKQSGKTILDFLKSDGFANRNFMQLIHDDSLTFKEDIQKAQVSGQGDSLHEHIANLAGSPAIKKGILQTVKVVDELVKVMGRHKPENIVIEMARENQTTQKGQKNSRERMKRIEEGIKELGSQILKEHPVENTQLQNEKLYLYYLQNGRDMYVDQELDINRLSDYDVDHIVPQSFLKDDSIDNKVLTRSDKNRGKSDNVPSEEVVKKMKNYWRQLLNAKLITQRKFDNLTKAERGGLSELDKAGFIKRQLVETRQITKHVAQILDSRMNTKYDENDKLIREVKVITLKSKLVSDFRKDFQFYKVREINNYHHAHDAYLNAVVGTALIKKYPKLESEFVYGDYKVYDVRKMIAKSEQEIGKATAKYFFYSNIMNFFKTEITLANGEIRKRPLIETNGETGEIVWDKGRDFATVRKVLSMPQVNIVKKTEVQTGGFSKESILPKRNSDKLIARKKDWDPKKYGGFDSPTVAYSVLVVAKVEKGKSKKLKSVKELLGITIMERSSFEKNPIDFLEAKGYKEVKKDLIIKLPKYSLFELENGRKRMLASAGELQKGNELALPSKYVNFLYLASHYEKLKGSPEDNEQKQLFVEQHKHYLDEIIEQISEFSKRVILADANLDKVLSAYNKHRDKPIREQAENIIHLFTLTNLGAPAAFKYFDTTIDRKRYTSTKEVLDATLIHQSITGLYETRIDLSQLGGDSGGSPKKKRKV

SEQ ID NO: 188 - protein, 1775 aa, Artificial Sequence
  Synthetic
MSEVEFSHEYWMRHALTLAKRAWDEREVPVGAVLVHNNRVIGEGWNRPIGRHDPTAHAEIMALRQGGLVMQNYRLIDATLYVTLEPCVMCAGAMIHSRIGRVVFGARDAKTGAAGSLMDVLHHPGMNHRVEITEGILADECAALLSDFFRMRRQEIKAQKKAQSSTDSGGSSGGSSGSETPGTSESATPESSGGSSGGSSEVEFSHEYWMRHALTLAKRAWDEREVPVGAVLVLNNRVIGEGWNRAIGLHDPTAHAEIMALRQGGLVMQNYRLIDATLYVTFEPCVMCAGAMIHSRIGRVVFGVRNAKTGAAGSLMDVLHYPGMNHRVEITEGILADECNALLCYFFRMRRQVFNAQKKAQSSTDSGGSSGGSSGSETPGTSESATPESSGGSSGGSDKKYSIGLAIGTNSVGWAVITDEYKVPSKKFKVLGNTDRHSIKKNLIGALLFDSGETAEATRLKRTARRRYTRRKNRICYLQEIFSNEMAKVDDSFFHRLEESFLVEEDKKHERHPIFGNIVDEVAYHEKYPTIYHLRKKLVDSTDKADLRLIYLALAHMIKFRGHFLIEGDLNPDNSDVDKLFIQLVQTYNQLFEENPINASGVDAKAILSARLSKSRRLENLIAQLPGEKKNGLFGNLIALSLGLTPNFKSNFDLAEDAKLQLSKDTYDDDLDNLLAQIGDQYADLFLAAKNLSDAILLSDILRVNTEITKAPLSASMIKRYDEHHQDLTLLKALVRQQLPEKYKEIFFDQSKNGYAGYIDGGASQEEFYKFIKPILEKMDGTEELLVKLNREDLLRKQRTFDNGSIPHQIHLGELHAILRRQEDFYPFLKDNREKIEKILTFRIPYYVGPLARGNSRFAWMTRKSEETITPWNFEEVVDKGASAQSFIERMTNFDKNLPNEKVLPKHSLLYEYFTVYNELTKVKYVTEGMRKPAFLSGEQKKAIVDLLFKTNRKVTVKQLKEDYFKKIECFDSVEISGVEDRFNASLGTYHDLLKIIKDKDFLDNEENEDILEDIVLTLTLFEDREMIEERLKTYAHLFDDKVMKQLKRRRYTGWGRLSRKLINGIRDKQSGKTILDFLKSDGFANRNFMQLIHDDSLTFKEDIQKAQVSGQGDSLHEHIANLAGSPAIKKGILQTVKVVDELVKVMGRHKPENIVIEMARENQTTQKGQKNSRERMKRIEEGIKELGSQILKEHPVENTQLQNEKLYLYYLQNGRDMYVDQELDINRLSDYDVDHIVPQSFLKDDSIDNKVLTRSDKNRGKSDNVPSEEVVKKMKNYWRQLLNAKLITQRKFDNLTKAERGGLSELDKAGFIKRQLVETRQITKHVAQILDSRMNTKYDENDKLIREVKVITLKSKLVSDFRKDFQFYKVREINNYHHAHDAYLNAVVGTALIKKYPKLESEFVYGDYKVYDVRKMIAKSEQEIGKATAKYFFYSNIMNFFKTEITLANGEIRKRPLIETNGETGEIVWDKGRDFATVRKVLSMPQVNIVKKTEVQTGGFSKESILPKRNSDKLIARKKDWDPKKYGGFDSPTVAYSVLVVAKVEKGKSKKLKSVKELLGITIMERSSFEKNPIDFLEAKGYKEVKKDLIIKLPKYSLFELENGRKRMLASAGELQKGNELALPSKYVNFLYLASHYEKLKGSPEDNEQKQLFVEQHKHYLDEIIEQISEFSKRVILADANLDKVLSAYNKHRDKPIREQAENIIHLFTLTNLGAPAAFKYFDTTIDRKRYTSTKEVLDATLIHQSITGLYETRIDLSQLGGDSGGSPKKKRKV

SEQ ID NO: 189 - protein, 1775 aa, Artificial Sequence
  Synthetic
MSEVEFSHEYWMRHALTLAKRAWDEREVPVGAVLVHNNRVIGEGWNRPIGRHDPTAHAEIMALRQGGLVMQNYRLIDATLYVTLEPCVMCAGAMIHSRIGRVVFGARDAKTGAAGSLMDVLHHPGMNHRVEITEGILADECAALLSDFFRMRRQEIKAQKKAQSSTDSGGSSGGSSGSETPGTSESATPESSGGSSGGSSEVEFSHEYWMRHALTLAKRARDEREVPVGAVLVLNNRVIGEGWNRAIGLHDPTAHAEIMALRQGGLVMQNYRLIDATLYVTFEPCVMCAGAMIHSRIGRVVFGVRNAKTGAAGSLMDVLHYPGMNHRVEITEGILADECAALLCYFFRMPRQVFNAQKKAQSSTDSGGSSGGSSGSETPGTSESATPESSGGSSGGSDKKYSIGLAIGTNSVGWAVITDEYKVPSKKFKVLGNTDRHSIKKNLIGALLFDSGETAEATRLKRTARRRYTRRKNRICYLQEIFSNEMAKVDDSFFHRLEESFLVEEDKKHERHPIFGNIVDEVAYHEKYPTIYHLRKKLVDSTDKADLRLIYLALAHMIKFRGHFLIEGDLNPDNSDVDKLFIQLVQTYNQLFEENPINASGVDAKAILSARLSKSRRLENLIAQLPGEKKNGLFGNLIALSLGLTPNFKSNFDLAEDAKLQLSKDTYDDDLDNLLAQIGDQYADLFLAAKNLSDAILLSDILRVNTEITKAPLSASMIKRYDEHHQDLTLLKALVRQQLPEKYKEIFFDQSKNGYAGYIDGGASQEEFYKFIKPILEKMDGTEELLVKLNREDLLRKQRTFDNGSIPHQIHLGELHAILRRQEDFYPFLKDNREKIEKILTFRIPYYVGPLARGNSRFAWMTRKSEETITPWNFEEVVDKGASAQSFIERMTNFDKNLPNEKVLPKHSLLYEYFTVYNELTKVKYVTEGMRKPAFLSGEQKKAIVDLLFKTNRKVTVKQLKEDYFKKIECFDSVEISGVEDRFNASLGTYHDLLKIIKDKDFLDNEENEDILEDIVLTLTLFEDREMIEERLKTYAHLFDDKVMKQLKRRRYTGWGRLSRKLINGIRDKQSGKTILDFLKSDGFANRNFMQLIHDDSLTFKEDIQKAQVSGQGDSLHEHIANLAGSPAIKKGILQTVKVVDELVKVMGRHKPENIVIEMARENQTTQKGQKNSRERMKRIEEGIKELGSQILKEHPVENTQLQNEKLYLYYLQNGRDMYVDQELDINRLSDYDVDHIVPQSFLKDDSIDNKVLTRSDKNRGKSDNVPSEEVVKKMKNYWRQLLNAKLITQRKFDNLTKAERGGLSELDKAGFIKRQLVETRQITKHVAQILDSRMNTKYDENDKLIREVKVITLKSKLVSDFRKDFQFYKVREINNYHHAHDAYLNAVVGTALIKKYPKLESEFVYGDYKVYDVRKMIAKSEQEIGKATAKYFFYSNIMNFFKTEITLANGEIRKRPLIETNGETGEIVWDKGRDFATVRKVLSMPQVNIVKKTEVQTGGFSKESILPKRNSDKLIARKKDWDPKKYGGFDSPTVAYSVLVVAKVEKGKSKKLKSVKELLGITIMERSSFEKNPIDFLEAKGYKEVKKDLIIKLPKYSLFELENGRKRMLASAGELQKGNELALPSKYVNFLYLASHYEKLKGSPEDNEQKQLFVEQHKHYLDEIIEQISEFSKRVILADANLDKVLSAYNKHRDKPIREQAENIIHLFTLTNLGAPAAFKYFDTTIDRKRYTSTKEVLDATLIHQSITGLYETRIDLSQLGGDSGGSPKKKRKV

SEQ ID NO: 190 - protein, 1775 aa, Artificial Sequence
  Synthetic
MSEVEFSHEYWMRHALTLAKRAWDEREVPVGAVLVHNNRVIGEGWNRPIGRHDPTAHAEIMALRQGGLVMQNYRLIDATLYVTLEPCVMCAGAMIHSRIGRVVFGARDAKTGAAGSLMDVLHHPGMNHRVEITEGILADECAALLSDFFRMRRQEIKAQKKAQSSTDSGGSSGGSSGSETPGTSESATPESSGGSSGGSSEVEFSHEYWMRHALTLAKRALDEREVPVGAVLVLNNRVIGEGWNRAIGLHDPTAHAEIMALRQGGLVMQNYRLIDATLYVTFEPCVMCAGAMIHSRIGRVVFGVRNAKTGAAGSLMDVLHYPGMNHRVEITEGILADECNALLCYFFRMRRQVFNAQKKAQSSTDSGGSSGGSSGSETPGTSESATPESSGGSSGGSDKKYSIGLAIGTNSVGWAVITDEYKVPSKKFKVLGNTDRHSIKKNLIGALLFDSGETAEATRLKRTARRRYTRRKNRICYLQEIFSNEMAKVDDSFFHRLEESFLVEEDKKHERHPIFGNIVDEVAYHEKYPTIYHLRKKLVDSTDKADLRLIYLALAHMIKFRGHFLIEGDLNPDNSDVDKLFIQLVQTYNQLFEENPINASGVDAKAILSARLSKSRRLENLIAQLPGEKKNGLFGNLIALSLGLTPNFKSNFDLAEDAKLQLSKDTYDDDLDNLLAQIGDQYADLFLAAKNLSDAILLSDILRVNTEITKAPLSASMIKRYDEHHQDLTLLKALVRQQLPEKYKEIFFDQSKNGYAGYIDGGASQEEFYKFIKPILEKMDGTEELLVKLNREDLLRKQRTFDNGSIPHQIHLGELHAILRRQEDFYPFLKDNREKIEKILTFRIPYYVGPLARGNSRFAWMTRKSEETITPWNFEEVVDKGASAQSFIERMTNFDKNLPNEKVLPKHSLLYEYFTVYNELTKVKYVTEGMRKPAFLSGEQKKAIVDLLFKTNRKVTVKQLKEDYFKKIECFDSVEISGVEDRFNASLGTYHDLLKIIKDKDFLDNEENEDILEDIVLTLTLFEDREMIEERLKTYAHLFDDKVMKQLKRRRYTGWGRLSRKLINGIRDKQSGKTILDFLKSDGFANRNFMQLIHDDSLTFKEDIQKAQVSGQGDSLHEHIANLAGSPAIKKGILQTVKVVDELVKVMGRHKPENIVIEMARENQTTQKGQKNSRERMKRIEEGIKELGSQILKEHPVENTQLQNEKLYLYYLQNGRDMYVDQELDINRLSDYDVDHIVPQSFLKDDSIDNKVLTRSDKNRGKSDNVPSEEVVKKMKNYWRQLLNAKLITQRKFDNLTKAERGGLSELDKAGFIKRQLVETRQITKHVAQILDSRMNTKYDENDKLIREVKVITLKSKLVSDFRKDFQFYKVREINNYHHAHDAYLNAVVGTALIKKYPKLESEFVYGDYKVYDVRKMIAKSEQEIGKATAKYFFYSNIMNFFKTEITLANGEIRKRPLIETNGETGEIVWDKGRDFATVRKVLSMPQVNIVKKTEVQTGGFSKESILPKRNSDKLIARKKDWDPKKYGGFDSPTVAYSVLVVAKVEKGKSKKLKSVKELLGITIMERSSFEKNPIDFLEAKGYKEVKKDLIIKLPKYSLFELENGRKRMLASAGELQKGNELALPSKYVNFLYLASHYEKLKGSPEDNEQKQLFVEQHKHYLDEIIEQISEFSKRVILADANLDKVLSAYNKHRDKPIREQAENIIHLFTLTNLGAPAAFKYFDTTIDRKRYTSTKEVLDATLIHQSITGLYETRIDLSQLGGDSGGSPKKKRKV

SEQ ID NO: 191 - protein, 1775 aa, Artificial Sequence
  Synthetic
MSEVEFSHEYWMRHALTLAKRAWDEREVPVGAVLVHNNRVIGEGWNRPIGRHDPTAHAEIMALRQGGLVMQNYRLIDATLYVTLEPCVMCAGAMIHSRIGRVVFGARDAKTGAAGSLMDVLHHPGMNHRVEITEGILADECAALLSDFFRMRRQEIKAQKKAQSSTDSGGSSGGSSGSETPGTSESATPESSGGSSGGSSEVEFSHEYWMRHALTLAKRALDEREVPVGAVLVLNNRVIGEGWNRAIGLHDPTAHAEIMALRQGGLVMQNYRLIDATLYVTFEPCVMCAGAMIHSRIGRVVFGVRNAKTGAAGSLMDVLHYPGMNHRVEITEGILADECNALLCYFFRMPRQVFNAQKKAQSSTDSGGSSGGSSGSETPGTSESATPESSGGSSGGSDKKYSIGLAIGTNSVGWAVITDEYKVPSKKFKVLGNTDRHSIKKNLIGALLFDSGETAEATRLKRTARRRYTRRKNRICYLQEIFSNEMAKVDDSFFHRLEESFLVEEDKKHERHPIFGNIVDEVAYHEKYPTIYHLRKKLVDSTDKADLRLIYLALAHMIKFRGHFLIEGDLNPDNSDVDKLFIQLVQTYNQLFEENPINASGVDAKAILSARLSKSRRLENLIAQLPGEKKNGLFGNLIALSLGLTPNFKSNFDLAEDAKLQLSKDTYDDDLDNLLAQIGDQYADLFLAAKNLSDAILLSDILRVNTEITKAPLSASMIKRYDEHHQDLTLLKALVRQQLPEKYKEIFFDQSKNGYAGYIDGGASQEEFYKFIKPILEKMDGTEELLVKLNREDLLRKQRTFDNGSIPHQIHLGELHAILRRQEDFYPFLKDNREKIEKILTFRIPYYVGPLARGNSRFAWMTRKSEETITPWNFEEVVDKGASAQSFIERMTNFDKNLPNEKVLPKHSLLYEYFTVYNELTKVKYVTEGMRKPAFLSGEQKKAIVDLLFKTNRKVTVKQLKEDYFKKIECFDSVEISGVEDRFNASLGTYHDLLKIIKDKDFLDNEENEDILEDIVLTLTLFEDREMIEERLKTYAHLFDDKVMKQLKRRRYTGWGRLSRKLINGIRDKQSGKTILDFLKSDGFANRNFMQLIHDDSLTFKEDIQKAQVSGQGDSLHEHIANLAGSPAIKKGILQTVKVVDELVKVMGRHKPENIVIEMARENQTTQKGQKNSRERMKRIEEGIKELGSQILKEHPVENTQLQNEKLYLYYLQNGRDMYVDQELDINRLSDYDVDHIVPQSFLKDDSIDNKVLTRSDKNRGKSDNVPSEEVVKKMKNYWRQLLNAKLITQRKFDNLTKAERGGLSELDKAGFIKRQLVETRQITKHVAQILDSRMNTKYDENDKLIREVKVITLKSKLVSDFRKDFQFYKVREINNYHHAHDAYLNAVVGTALIKKYPKLESEFVYGDYKVYDVRKMIAKSEQEIGKATAKYFFYSNIMNFFKTEITLANGEIRKRPLIETNGETGEIVWDKGRDFATVRKVLSMPQVNIVKKTEVQTGGFSKESILPKRNSDKLIARKKDWDPKKYGGFDSPTVAYSVLVVAKVEKGKSKKLKSVKELLGITIMERSSFEKNPIDFLEAKGYKEVKKDLIIKLPKYSLFELENGRKRMLASAGELQKGNELALPSKYVNFLYLASHYEKLKGSPEDNEQKQLFVEQHKHYLDEIIEQISEFSKRVILADANLDKVLSAYNKHRDKPIREQAENIIHLFTLTNLGAPAAFKYFDTTIDRKRYTSTKEVLDATLIHQSITGLYETRIDLSQLGGDSGGSPKKKRKV

SEQ ID NO: 192 - protein, 1775 aa, Artificial Sequence; identical to SEQ ID NO: 189
  Synthetic

SEQ ID NO: 193 - protein, 1767 aa, Artificial Sequence
  Synthetic
MSEVEFSHEYWMRHALTLAKRAWDEREVPVGAVLVHNNRVIGEGWNRPIGRHDPTAHAEIMALRQGGLVMQNYRLIDATLYVTLEPCVMCAGAMIHSRIGRVVFGARDAKTGAAGSLMDVLHHPGMNHRVEITEGILADECAALLSDFFRMRRQEIKAQKKAQSSTDSGGSSGGSSGSETPGTSESATPESSGGSSGGSSEVEFSHEYWMRHALTLAKRAWDEREVPVGAVLVLNNRVIGEGWNRAIGLHDPTAHAEIMALRQGGLVMQNYRLIDATLYVTFEPCVMCAGAMIHSRIGRVVFGVRNAKTGAAGSLMDVLHYPGMNHRVEITEGILADECAALLCYFFRMPRQVFNAQKKAQSSTDSGGSSGGSSGSETPGTSESATPESDKKYSIGLAIGTNSVGWAVITDEYKVPSKKFKVLGNTDRHSIKKNLIGALLFDSGETAEATRLKRTARRRYTRRKNRICYLQEIFSNEMAKVDDSFFHRLEESFLVEEDKKHERHPIFGNIVDEVAYHEKYPTIYHLRKKLVDSTDKADLRLIYLALAHMIKFRGHFLIEGDLNPDNSDVDKLFIQLVQTYNQLFEENPINASGVDAKAILSARLSKSRRLENLIAQLPGEKKNGLFGNLIALSLGLTPNFKSNFDLAEDAKLQLSKDTYDDDLDNLLAQIGDQYADLFLAAKNLSDAILLSDILRVNTEITKAPLSASMIKRYDEHHQDLTLLKALVRQQLPEKYKEIFFDQSKNGYAGYIDGGASQEEFYKFIKPILEKMDGTEELLVKLNREDLLRKQRTFDNGSIPHQIHLGELHAILRRQEDFYPFLKDNREKIEKILTFRIPYYVGPLARGNSRFAWMTRKSEETITPWNFEEVVDKGASAQSFIERMTNFDKNLPNEKVLPKHSLLYEYFTVYNELTKVKYVTEGMRKPAFLSGEQKKAIVDLLFKTNRKVTVKQLKEDYFKKIECFDSVEISGVEDRFNASLGTYHDLLKIIKDKDFLDNEENEDILEDIVLTLTLFEDREMIEERLKTYAHLFDDKVMKQLKRRRYTGWGRLSRKLINGIRDKQSGKTILDFLKSDGFANRNFMQLIHDDSLTFKEDIQKAQVSGQGDSLHEHIANLAGSPAIKKGILQTVKVVDELVKVMGRHKPENIVIEMARENQTTQKGQKNSRERMKRIEEGIKELGSQILKEHPVENTQLQNEKLYLYYLQNGRDMYVDQELDINRLSDYDVDHIVPQSFLKDDSIDNKVLTRSDKNRGKSDNVPSEEVVKKMKNYWRQLLNAKLITQRKFDNLTKAERGGLSELDKAGFIKRQLVETRQITKHVAQILDSRMNTKYDENDKLIREVKVITLKSKLVSDFRKDFQFYKVREINNYHHAHDAYLNAVVGTALIKKYPKLESEFVYGDYKVYDVRKMIAKSEQEIGKATAKYFFYSNIMNFFKTEITLANGEIRKRPLIETNGETGEIVWDKGRDFATVRKVLSMPQVNIVKKTEVQTGGFSKESILPKRNSDKLIARKKDWDPKKYGGFDSPTVAYSVLVVAKVEKGKSKKLKSVKELLGITIMERSSFEKNPIDFLEAKGYKEVKKDLIIKLPKYSLFELENGRKRMLASAGELQKGNELALPSKYVNFLYLASHYEKLKGSPEDNEQKQLFVEQHKHYLDEIIEQISEFSKRVILADANLDKVLSAYNKHRDKPIREQAENIIHLFTLTNLGAPAAFKYFDTTIDRKRYTSTKEVLDATLIHQSITGLYETRIDLSQLGGDSGGSPKKKRKV

SEQ ID NO: 194 - protein, 1767 aa, Artificial Sequence
  Synthetic
MSEVEFSHEYWMRHALTLAKRAWDEREVPVGAVLVHNNRVIGEGWNRPIGRHDPTAHAEIMALRQGGLVMQNYRLIDATLYVTLEPCVMCAGAMIHSRIGRVVFGARDAKTGAAGSLMDVLHHPGMNHRVEITEGILADECAALLSDFFRMRRQEIKAQKKAQSSTDSGGSSGGSSGSETPGTSESATPESSGGSSGGSSEVEFSHEYWMRHALTLAKRAWDEREVPVGAVLVLNNRVIGEGWNRAIGLHDPTAHAEIMALRQGGLVMQNYRLIDATLYVTFEPCVMCAGAMIHSRIGRVVFGVRNAKTGAAGSLMDVLHYPGMNHRVEITEGILADECNALLCYFFRMPRQVFNAQKKAQSSTDSGGSSGGSSGSETPGTSESATPESDKKYSIGLAIGTNSVGWAVITDEYKVPSKKFKVLGNTDRHSIKKNLIGALLFDSGETAEATRLKRTARRRYTRRKNRICYLQEIFSNEMAKVDDSFFHRLEESFLVEEDKKHERHPIFGNIVDEVAYHEKYPTIYHLRKKLVDSTDKADLRLIYLALAHMIKFRGHFLIEGDLNPDNSDVDKLFIQLVQTYNQLFEENPINASGVDAKAILSARLSKSRRLENLIAQLPGEKKNGLFGNLIALSLGLTPNFKSNFDLAEDAKLQLSKDTYDDDLDNLLAQIGDQYADLFLAAKNLSDAILLSDILRVNTEITKAPLSASMIKRYDEHHQDLTLLKALVRQQLPEKYKEIFFDQSKNGYAGYIDGGASQEEFYKFIKPILEKMDGTEELLVKLNREDLLRKQRTFDNGSIPHQIHLGELHAILRRQEDFYPFLKDNREKIEKILTFRIPYYVGPLARGNSRFAWMTRKSEETITPWNFEEVVDKGASAQSFIERMTNFDKNLPNEKVLPKHSLLYEYFTVYNELTKVKYVTEGMRKPAFLSGEQKKAIVDLLFKTNRKVTVKQLKEDYFKKIECFDSVEISGVEDRFNASLGTYHDLLKIIKDKDFLDNEENEDILEDIVLTLTLFEDREMIEERLKTYAHLFDDKVMKQLKRRRYTGWGRLSRKLINGIRDKQSGKTILDFLKSDGFANRNFMQLIHDDSLTFKEDIQKAQVSGQGDSLHEHIANLAGSPAIKKGILQTVKVVDELVKVMGRHKPENIVIEMARENQTTQKGQKNSRERMKRIEEGIKELGSQILKEHPVENTQLQNEKLYLYYLQNGRDMYVDQELDINRLSDYDVDHIVPQSFLKDDSIDNKVLTRSDKNRGKSDNVPSEEVVKKMKNYWRQLLNAKLITQRKFDNLTKAERGGLSELDKAGFIKRQLVETRQITKHVAQILDSRMNTKYDENDKLIREVKVITLKSKLVSDFRKDFQFYKVREINNYHHAHDAYLNAVVGTALIKKYPKLESEFVYGDYKVYDVRKMIAKSEQEIGKATAKYFFYSNIMNFFKTEITLANGEIRKRPLIETNGETGEIVWDKGRDFATVRKVLSMPQVNIVKKTEVQTGGFSKESILPKRNSDKLIARKKDWDPKKYGGFDSPTVAYSVLVVAKVEKGKSKKLKSVKELLGITIMERSSFEKNPIDFLEAKGYKEVKKDLIIKLPKYSLFELENGRKRMLASAGELQKGNELALPSKYVNFLYLASHYEKLKGSPEDNEQKQLFVEQHKHYLDEIIEQISEFSKRVILADANLDKVLSAYNKHRDKPIREQAENIIHLFTLTNLGAPAAFKYFDTTIDRKRYTSTKEVLDATLIHQSITGLYETRIDLSQLGGDSGGSPKKKRKV

SEQ ID NO: 195 - protein, 1767 aa, Artificial Sequence
  Synthetic
MSEVEFSHEYWMRHALTLAKRAWDEREVPVGAVLVHNNRVIGEGWNRPIGRHDPTAHAEIMALRQGGLVMQNYRLIDATLYVTLEPCVMCAGAMIHSRIGRVVFGARDAKTGAAGSLMDVLHHPGMNHRVEITEGILADECAALLSDFFRMRRQEIKAQKKAQSSTDSGGSSGGSSGSETPGTSESATPESSGGSSGGSSEVEFSHEYWMRHALTLAKRALDEREVPVGAVLVLNNRVIGEGWNRAIGLHDPTAHAEIMALRQGGLVMQNYRLIDATLYVTFEPCVMCAGAMIHSRIGRVVFGVRNAKTGAAGSLMDVLHYPGMNHRVEITEGILADECAALLCYFFRMPRQVFNAQKKAQSSTDSGGSSGGSSGSETPGTSESATPESDKKYSIGLAIGTNSVGWAVITDEYKVPSKKFKVLGNTDRHSIKKNLIGALLFDSGETAEATRLKRTARRRYTRRKNRICYLQEIFSNEMAKVDDSFFHRLEESFLVEEDKKHERHPIFGNIVDEVAYHEKYPTIYHLRKKLVDSTDKADLRLIYLALAHMIKFRGHFLIEGDLNPDNSDVDKLFIQLVQTYNQLFEENPINASGVDAKAILSARLSKSRRLENLIAQLPGEKKNGLFGNLIALSLGLTPNFKSNFDLAEDAKLQLSKDTYDDDLDNLLAQIGDQYADLFLAAKNLSDAILLSDILRVNTEITKAPLSASMIKRYDEHHQDLTLLKALVRQQLPEKYKEIFFDQSKNGYAGYIDGGASQEEFYKFIKPILEKMDGTEELLVKLNREDLLRKQRTFDNGSIPHQIHLGELHAILRRQEDFYPFLKDNREKIEKILTFRIPYYVGPLARGNSRFAWMTRKSEETITPWNFEEVVDKGASAQSFIERMTNFDKNLPNEKVLPKHSLLYEYFTVYNELTKVKYVTEGMRKPAFLSGEQKKAIVDLLFKTNRKVTVKQLKEDYFKKIECFDSVEISGVEDRFNASLGTYHDLLKIIKDKDFLDNEENEDILEDIVLTLTLFEDREMIEERLKTYAHLFDDKVMKQLKRRRYTGWGRLSRKLINGIRDKQSGKTILDFLKSDGFANRNFMQLIHDDSLTFKEDIQKAQVSGQGDSLHEHIANLAGSPAIKKGILQTVKVVDELVKVMGRHKPENIVIEMARENQTTQKGQKNSRERMKRIEEGIKELGSQILKEHPVENTQLQNEKLYLYYLQNGRDMYVDQELDINRLSDYDVDHIVPQSFLKDDSIDNKVLTRSDKNRGKSDNVPSEEVVKKMKNYWRQLLNAKLITQRKFDNLTKAERGGLSELDKAGFIKRQLVETRQITKHVAQILDSRMNTKYDENDKLIREVKVITLKSKLVSDFRKDFQFYKVREINNYHHAHDAYLNAVVGTALIKKYPKLESEFVYGDYKVYDVRKMIAKSEQEIGKATAKYFFYSNIMNFFKTEITLANGEIRKRPLIETNGETGEIVWDKGRDFATVRKVLSMPQVNIVKKTEVQTGGFSKESILPKRNSDKLIARKKDWDPKKYGGFDSPTVAYSVLVVAKVEKGKSKKLKSVKELLGITIMERSSFEKNPIDFLEAKGYKEVKKDLIIKLPKYSLFELENGRKRMLASAGELQKGNELALPSKYVNFLYLASHYEKLKGSPEDNEQKQLFVEQHKHYLDEIIEQISEFSKRVILADANLDKVLSAYNKHRDKPIREQAENIIHLFTLTNLGAPAAFKYFDTTIDRKRYTSTKEVLDATLIHQSITGLYETRIDLSQLGGDSGGSPKKKRKV

SEQ ID NO: 196 - protein, 1775 aa, Artificial Sequence; identical to SEQ ID NO: 185
  Synthetic

SEQ ID NO: 197 - protein, 1775 aa, Artificial Sequence; identical to SEQ ID NO: 186
  Synthetic

SEQ ID NO: 198 - protein, 1776 aa, Artificial Sequence
  Synthetic
MSEVEFSHEYWMRHALTLAKRAWDEREVPVGAVLVHNNRVIGEGWNRPIGRHDPTAHAEIMALRQGGLVMQNYRLIDATLYVTLEPCVMCAGAMIHSRIGRVVFGARDAKTGAAGSLMDVLHHPGMNHRVEITEGILADECAALLSDFFRMRRQEIKAQKKAQSSTDSGGSSGGSSGSETPGTSESATPESSGGSSGGSSEVEFSHEYWMRHALTLAKRALDEREVPVGAVLVLNNRVIGEGWNRAIGLHDPTAHAEIMALRQGGLVMQNYRLIDATLYVTFEPCVMCAGAMIHSRIGRVVFGVRNAKTGAAGSLMDVLHYPGMNHRVEITEGILADECNALLCYFFRMRRQVFNAQKKAQSSTDSGGSSGGSSGSETPGTSESATPESSGGSSGGSDKKYSIGLAIGTNSVGWAVITDEYKVPSKKFKVLGNTDRHSIKKNLIGALLFDSGETAEATRLKRTARRRYTRRKNRICYLQEIFSNEMAKVDDSFFHRLEESFLVEEDKKHERHPIFGNIVDEVAYHEKYPTIYHLRKKLVDSTDKADLRLIYLALAHMIKFRGHFLIEGDLNPDNSDVDKLFIQLVQTYNQLFEENPINASGVDAKAILSARLSKSRRLENLIAQLPGEKKNGLFGNLIALSLGLTPNFKSNFDLAEDAKLQLSKDTYDDDLDNLLAQIGDQYADLFLAAKNLSDAILLSDILRVNTEITKAPLSASMIKRYDEHHQDLTLLKALVRQQLPEKYKEIFFDQSKNGYAGYIDGGASQEEFYKFIKPILEKMDGTEELLVKLNREDLLRKQRTFDNGSIPHQIHLGELHAILRRQEDFYPFLKDNREKIEKILTFRIPYYVGPLARGNSRFAWMTRKSEETITPWNFEEVVDKGASAQSFIERMTNFDKNLPNEKVLPKHSLLYEYFTVYNELTKVKYVTEGMRKPAFLSGEQKKAIVDLLFKTNRKVTVKQLKEDYFKKIECFDSVEISGVEDRFNASLGTYHDLLKIIKDKDFLDNEENEDILEDIVLTLTLFEDREMIEERLKTYAHLFDDKVMKQLKRRRYTGWGRLSRKLINGIRDKQSGKTILDFLKSDGFANRNFMQLIHDDSLTFKEDIQKAQVSGQGDSLHEHIANLAGSPAIKKGILQTVKVVDELVKVMGRHKPENIVIEMARENQTTQKGQKNSRERMKRIEEGIKELGSQILKEHPVENTQLQNEKLYLYYLQNGRDMYVDQELDINRLSDYDVDHIVPQSFLKDDSIDNKVLTRSDKNRGKSDNVPSEEVVKKMKNYWRQLLNAKLITQRKFDNLTKAERGGLSELDKAGFIKRQLVETRQITKHVAQILDSRMNTKYDENDKLIREVKVITLKSKLVSDFRKDFQFYKVREINNYHHAHDAYLNAVVGTALIKKYPKLESEFVYGDYKVYDVRKMIAKSEQEIGKATAKYFFYSNIMNFFKTEITLANGEIRKRPLIETNGETGEIVWDKGRDFATVRKVLSMPQVNIVKKTEVQTGGFSKESILPKRNSDKLIARKKDWDPKKYGGFDSPTVAYSVLVVAKVEKGKSKKLKSVKELLGITIMERSSFEKNPIDFLEAKGYKEVKKDLIIKLPKYSLFELENGRKRMLASAGELQKGNELALPSKYVNFLYLASHYEKLKGSPEDNEQKQLFVEQHKHYLDEIIEQISEFSKRVILADANLDKVLSAYNKHRDKPIREQAENIIHLFTLTNLGAPAAFKYFDTTIDRKRYTSTKEVLDATLIHQSITGLYETRIDLSQLGGDSGGSPKKKRKVC

SEQ ID NO: 199 - protein, 1773 aa, Artificial Sequence
  Synthetic
MSEVEFSHEYWMRHALTLAKRAWDEREVPVGAVLVHNNRVIGEGWNRPIGRHDPTAHAEIMALRQGGLVMQNYRLIDATLYVTLEPCVMCAGAMIHSRIGRVVFGARDAKTGAAGSLMDVLHHPGMNHRVEITEGILADECAALLSDFFRMRRQEIKAQKKAQSSTDSGGSSGGSSGSETPGTSESATPESSGGSSGGSSEVEFSHEYWMRHALTLAKRALDEREVPVGAVLVLNNRGEGWNRAIGLHDPTAHAEIMALRQGGLVMQNYRLIDATLYVTFEPCVMCAGAMIHSRIGRVVFGVRNAKTGAAGSLMDVLHYPGMNHRVEITEGILADECNALLCYFFRMPRQVFNAQKKAQSSTDSGGSSGGSSGSETPGTSESATPESSGGSSGGSDKKYSIGLAIGTNSVGWAVITDEYKVPSKKFKVLGNTDRHSIKKNLIGALLFDSGETAEATRLKRTARRRYTRRKNRICYLQEIFSNEMAKVDDSFFHRLEESFLVEEDKKHERHPIFGNIVDEVAYHEKYPTIYHLRKKLVDSTDKADLRLIYLALAHMIKFRGHFLIEGDLNPDNSDVDKLFIQLVQTYNQLFEENPINASGVDAKAILSARLSKSRRLENLIAQLPGEKKNGLFGNLIALSLGLTPNFKSNFDLAEDAKLQLSKDTYDDDLDNLLAQIGDQYADLFLAAKNLSDAILLSDILRVNTEITKAPLSASMIKRYDEHHQDLTLLKALVRQQLPEKYKEIFFDQSKNGYAGYIDGGASQEEFYKFIKPILEKMDGTEELLVKLNREDLLRKQRTFDNGSIPHQIHLGELHAILRRQEDFYPFLKDNREKIEKILTFRIPYYVGPLARGNSRFAWMTRKSEETITPWNFEEVVDKGASAQSFIERMTNFDKNLPNEKVLPKHSLLYEYFTVYNELTKVKYVTEGMRKPAFLSGEQKKAIVDLLFKTNRKVTVKQLKEDYFKKIECFDSVEISGVEDRFNASLGTYHDLLKIIKDKDFLDNEENEDILEDIVLTLTLFEDREMIEERLKTYAHLFDDKVMKQLKRRRYTGWGRLSRKLINGIRDKQSGKTILDFLKSDGFANRNFMQLIHDDSLTFKEDIQKAQVSGQGDSLHEHIANLAGSPAIKKGILQTVKVVDELVKVMGRHKPENIVIEMARENQTTQKGQKNSRERMKRIEEGIKELGSQILKEHPVENTQLQNEKLYLYYLQNGRDMYVDQELDINRLSDYDVDHIVPQSFLKDDSIDNKVLTRSDKNRGKSDNVPSEEVVKKMKNYWRQLLNAKLITQRKFDNLTKAERGGLSELDKAGFIKRQLVETRQITKHVAQILDSRMNTKYDENDKLIREVKVITLKSKLVSDFRKDFQFYKVREINNYHHAHDAYLNAVVGTALIKKYPKLESEFVYGDYKVYDVRKMIAKSEQEIGKATAKYFFYSNIMNFFKTEITLANGEIRKRPLIETNGETGEIVWDKGRDFATVRKVLSMPQVNIVKKTEVQTGGFSKESILPKRNSDKLIARKKDWDPKKYGGFDSPTVAYSVLVVAKVEKGKSKKLKSVKELLGITIMERSSFEKNPIDFLEAKGYKEVKKDLIIKLPKYSLFELENGRKRMLASAGELQKGNELALPSKYVNFLYLASHYEKLKGSPEDNEQKQLFVEQHKHYLDEIIEQISEFSKRVILADANLDKVLSAYNKHRDKPIREQAENIIHLFTLTNLGAPAAFKYFDTTIDRKRYTSTKEVLDATLIHQSITGLYETRIDLSQLGGDSGGSPKKKRKV

SEQ ID NO: 200 - protein, 1775 aa, Artificial Sequence; identical to SEQ ID NO: 189
  Synthetic

SEQ ID NO: 201 - protein, 1803 aa, Artificial Sequence
  Synthetic
MKRTADGSEFESPKKKRKVSEVEFSHEYWMRHALTLAKRAWDEREVPVGAVLVHNNRVIGEGWNRPIGRHDPTAHAEIMALRQGGLVMQNYRLIDATLYVTLEPCVMCAGAMIHSRIGRVVFGARDAKTGAAGSLMDVLHHPGMNHRVEITEGILADECAALLSDFFRMRRQEIKAQKKAQSSTDSGGSSGGSSGSETPGTSESATPESSGGSSGGSSEVEFSHEYWMRHALTLAKRARDEREVPVGAVLVLNNRVIGEGWNRAIGLHDPTAHAEIMALRQGGLVMQNYRLIDATLYVTFEPCVMCAGAMIHSRIGRVVFGVRNAKTGAAGSLMDVLHYPGMNHRVEITEGILADECAALLCYFFRMPRQVFNAQKKAQSSTDSGGSSGGSSGSETPGTSESATPESSGGSSGGSDKKYSIGLAIGTNSVGWAVITDEYKVPSKKFKVLGNTDRHSIKKNLIGALLFDSGETAEATRLKRTARRRYTRRKNRICYLQEIFSNEMAKVDDSFFHRLEESFLVEEDKKHERHPIFGNIVDEVAYHEKYPTIYHLRKKLVDSTDKADLRLIYLALAHMIKFRGHFLIEGDLNPDNSDVDKLFIQLVQTYNQLFEENPINASGVDAKAILSARLSKSRRLENLIAQLPGEKKNGLFGNLIALSLGLTPNFKSNFDLAEDAKLQLSKDTYDDDLDNLLAQIGDQYADLFLAAKNLSDAILLSDILRVNTEITKAPLSASMIKRYDEHHQDLTLLKALVRQQLPEKYKEIFFDQSKNGYAGYIDGGASQEEFYKFIKPILEKMDGTEELLVKLNREDLLRKQRTFDNGSIPHQIHLGELHAILRRQEDFYPFLKDNREKIEKILTFRIPYYVGPLARGNSRFAWMTRKSEETITPWNFEEVVDKGASAQSFIERMTNFDKNLPNEKVLPKHSLLYEYFTVYNELTKVKYVTEGMRKPAFLSGEQKKAIVDLLFKTNRKVTVKQLKEDYFKKIECFDSVEISGVEDRFNASLGTYHDLLKIIKDKDFLDNEENEDILEDIVLTLTLFEDREMIEERLKTYAHLFDDKVMKQLKRRRYTGWGRLSRKLINGIRDKQSGKTILDFLKSDGFANRNFMQLIHDDSLTFKEDIQKAQVSGQGDSLHEHIANLAGSPAIKKGILQTVKVVDELVKVMGRHKPENIVIEMARENQTTQKGQKNSRERMKRIEEGIKELGSQILKEHPVENTQLQNEKLYLYYLQNGRDMYVDQELDINRLSDYDVDHIVPQSFLKDDSIDNKVLTRSDKNRGKSDNVPSEEVVKKMKNYWRQLLNAKLITQRKFDNLTKAERGGLSELDKAGFIKRQLVETRQITKHVAQILDSRMNTKYDENDKLIREVKVITLKSKLVSDFRKDFQFYKVREINNYHHAHDAYLNAVVGTALIKKYPKLESEFVYGDYKVYDVRKMIAKSEQEIGKATAKYFFYSNIMNFFKTEITLANGEIRKRPLIETNGETGEIVWDKGRDFATVRKVLSMPQVNIVKKTEVQTGGFSKESILPKRNSDKLIARKKDWDPKKYGGFVSPTVAYSVLVVAKVEKGKSKKLKSVKELLGITIMERSSFEKNPIDFLEAKGYKEVKKDLIIKLPKYSLFELENGRKRMLASARELQKGNELALPSKYVNFLYLASHYEKLKGSPEDNEQKQLFVEQHKHYLDEIIEQISEFSKRVILADANLDKVLSAYNKHRDKPIREQAENIIHLFTLTNLGAPAAFKYFDTTIDRKQYRSTKEVLDATLIHQSITGLYETRIDLSQLGGDSGGSKRTADGSEFEPKKKRKV

SEQ ID NO: 202 - protein, 1605 aa, Artificial Sequence
  Synthetic
MKRTADGSEFESPKKKRKVSEVEFSHEYWMRHALTLAKRARDEREVPVGAVLVLNNRVIGEGWNRAIGLHDPTAHAEIMALRQGGLVMQNYRLIDATLYVTFEPCVMCAGAMIHSRIGRVVFGVRNSKRGAAGSLMNVLNYPGMNHRVEITEGILADECAALLCDFYRMPRQVFNAQKKAQSSINSGGSSGGSSGSETPGTSESATPESSGGSSGGSDKKYSIGLAIGTNSVGWAVITDEYKVPSKKFKVLGNTDRHSIKKNLIGALLFDSGETAEATRLKRTARRRYTRRKNRICYLQEIFSNEMAKVDDSFFHRLEESFLVEEDKKHERHPIFGNIVDEVAYHEKYPTIYHLRKKLVDSTDKADLRLIYLALAHMIKFRGHFLIEGDLNPDNSDVDKLFIQLVQTYNQLFEENPINASGVDAKAILSARLSKSRRLENLIAQLPGEKKNGLFGNLIALSLGLTPNFKSNFDLAEDAKLQLSKDTYDDDLDNLLAQIGDQYADLFLAAKNLSDAILLSDILRVNTEITKAPLSASMIKRYDEHHQDLTLLKALVRQQLPEKYKEIFFDQSKNGYAGYIDGGASQEEFYKFIKPILEKMDGTEELLVKLNREDLLRKQRTFDNGSIPHQIHLGELHAILRRQEDFYPFLKDNREKIEKILTFRIPYYVGPLARGNSRFAWMTRKSEETITPWNFEEVVDKGASAQSFIERMTNFDKNLPNEKVLPKHSLLYEYFTVYNELTKVKYVTEGMRKPAFLSGEQKKAIVDLLFKTNRKVTVKQLKEDYFKKIECFDSVEISGVEDRFNASLGTYHDLLKIIKDKDFLDNEENEDILEDIVLTLTLFEDREMIEERLKTYAHLFDDKVMKQLKRRRYTGWGRLSRKLINGIRDKQSGKTILDFLKSDGFANRNFMQLIHDDSLTFKEDIQKAQVSGQGDSLHEHIANLAGSPAIKKGILQTVKVVDELVKVMGRHKPENIVIEMARENQTTQKGQKNSRERMKRIEEGIKELGSQILKEHPVENTQLQNEKLYLYYLQNGRDMYVDQELDINRLSDYDVDHIVPQSFLKDDSIDNKVLTRSDKNRGKSDNVPSEEVVKKMKNYWRQLLNAKLITQRKFDNLTKAERGGLSELDKAGFIKRQLVETRQITKHVAQILDSRMNTKYDENDKLIREVKVITLKSKLVSDFRKDFQFYKVREINNYHHAHDAYLNAVVGTALIKKYPKLESEFVYGDYKVYDVRKMIAKSEQEIGKATAKYFFYSNIMNFFKTEITLANGEIRKRPLIETNGETGEIVWDKGRDFATVRKVLSMPQVNIVKKTEVQTGGFSKESILPKRNSDKLIARKKDWDPKKYGGFDSPTVAYSVLVVAKVEKGKSKKLKSVKELLGITIMERSSFEKNPIDFLEAKGYKEVKKDLIIKLPKYSLFELENGRKRMLASAGELQKGNELALPSKYVNFLYLASHYEKLKGSPEDNEQKQLFVEQHKHYLDEIIEQISEFSKRVILADANLDKVLSAYNKHRDKPIREQAENIIHLFTLTNLGAPAAFKYFDTTIDRKRYTSTKEVLDATLIHQSITGLYETRIDLSQLGGDSGGSKRTADGSEFEPKKKRKV

SEQ ID NO: 203 - protein, 1803 aa, Artificial Sequence
  Synthetic
MKRTADGSEFESPKKKRKVSEVEFSHEYWMRHALTLAKRAWDEREVPVGAVLVHNNRVIGEGWNRPIGRHDPTAHAEIMALRQGGLVMQNYRLIDATLYVTLEPCVMCAGAMIHSRIGRVVFGARDAKTGAAGSLMDVLHHPGMNHRVEITEGILADECAALLSDFFRMRRQEIKAQKKAQSSTDSGGSSGGSSGSETPGTSESATPESSGGSSGGSSEVEFSHEYWMRHALTLAKRARDEREVPVGAVLVLNNRVIGEGWNRAIGLHDPTAHAEIMALRQGGLVMQNYRLIDATLYVTFEPCVMCAGAMIHSRIGRVVFGVRNSKRGAAGSLMNVLNYPGMNHRVEITEGILADECAALLCDFYRMPRQVFNAQKKAQSSINSGGSSGGSSGSETPGTSESATPESSGGSSGGSDKKYSIGLAIGTNSVGWAVITDEYKVPSKKFKVLGNTDRHSIKKNLIGALLFDSGETAEATRLKRTARRRYTRRKNRICYLQEIFSNEMAKVDDSFFHRLEESFLVEEDKKHERHPIFGNIVDEVAYHEKYPTIYHLRKKLVDSTDKADLRLIYLALAHMIKFRGHFLIEGDLNPDNSDVDKLFIQLVQTYNQLFEENPINASGVDAKAILSARLSKSRRLENLIAQLPGEKKNGLFGNLIALSLGLTPNFKSNFDLAEDAKLQLSKDTYDDDLDNLLAQIGDQYADLFLAAKNLSDAILLSDILRVNTEITKAPLSASMIKRYDEHHQDLTLLKALVRQQLPEKYKEIFFDQSKNGYAGYIDGGASQEEFYKFIKPILEKMDGTEELLVKLNREDLLRKQRTFDNGSIPHQIHLGELHAILRRQEDFYPFLKDNREKIEKILTFRIPYYVGPLARGNSRFAWMTRKSEETITPWNFEEVVDKGASAQSFIERMTNFDKNLPNEKVLPKHSLLYEYFTVYNELTKVKYVTEGMRKPAFLSGEQKKAIVDLLFKTNRKVTVKQLKEDYFKKIECFDSVEISGVEDRFNASLGTYHDLLKIIKDKDFLDNEENEDILEDIVLTLTLFEDREMIEERLKTYAHLFDDKVMKQLKRRRYTGWGRLSRKLINGIRDKQSGKTILDFLKSDGFANRNFMQLIHDDSLTFKEDIQKAQVSGQGDSLHEHIANLAGSPAIKKGILQTVKVVDELVKVMGRHKPENIVIEMARENQTTQKGQKNSRERMKRIEEGIKELGSQILKEHPVENTQLQNEKLYLYYLQNGRDMYVDQELDINRLSDYDVDHIVPQSFLKDDSIDNKVLTRSDKNRGKSDNVPSEEVVKKMKNYWRQLLNAKLITQRKFDNLTKAERGGLSELDKAGFIKRQLVETRQITKHVAQILDSRMNTKYDENDKLIREVKVITLKSKLVSDFRKDFQFYKVREINNYHHAHDAYLNAVVGTALIKKYPKLESEFVYGDYKVYDVRKMIAKSEQEIGKATAKYFFYSNIMNFFKTEITLANGEIRKRPLIETNGETGEIVWDKGRDFATVRKVLSMPQVNIVKKTEVQTGGFSKESILPKRNSDKLIARKKDWDPKKYGGFDSPTVAYSVLVVAKVEKGKSKKLKSVKELLGITIMERSSFEKNPIDFLEAKGYKEVKKDLIIKLPKYSLFELENGRKRMLASAGELQKGNELALPSKYVNFLYLASHYEKLKGSPEDNEQKQLFVEQHKHYLDEIIEQISEFSKRVILADANLDKVLSAYNKHRDKPIREQAENIIHLFTLTNLGAPAAFKYFDTTIDRKRYTSTKEVLDATLIHQSITGLYETRIDLSQLGGDSGGSKRTADGSEFEPKKKRKV

SEQ ID NO: 204 - protein, 1291 aa, Artificial Sequence
  Synthetic
MKRTADGSEFESPKKKRKVSEVEFSHEYWMRHALTLAKRARDEREVPVGAVLVLNNRVIGEGWNRAIGLHDPTAHAEIMALRQGGLVMQNYRLIDATLYVTFEPCVMCAGAMIHSRIGRVVFGVRNSKRGAAGSLMNVLNYPGMNHRVEITEGILADECAALLCDFYRMPRQVFNAQKKAQSSINSGGSSGGSSGSETPGTSESATPESSGGSSGGSGKRNYILGLAIGITSVGYGIIDYETRDVIDAGVRLFKEANVENNEGRRSKRGARRLKRRRRHRIQRVKKLLFDYNLLTDHSELSGINPYEARVKGLSQKLSEEEFSAALLHLAKRRGVHNVNEVEEDTGNELSTKEQISRNSKALEEKYVAELQLERLKKDGEVRGSINRFKTSDYVKEAKQLLKVQKAYHQLDQSFIDTYIDLLETRRTYYEGPGEGSPFGWKDIKEWYEMLMGHCTYFPEELRSVKYAYNADLYNALNDLNNLVITRDENEKLEYYEKFQIIENVFKQKKKPTLKQIAKEILVNEEDIKGYRVTSTGKPEFTNLKVYHDIKDITARKEIIENAELLDQIAKILTIYQSSEDIQEELTNLNSELTQEEIEQISNLKGYTGTHNLSLKAINLILDELWHTNDNQIAIFNRLKLVPKKVDLSQQKEIPTTLVDDFILSPVVKRSFIQSIKVINAIIKKYGLPNDIIIELAREKNSKDAQKMINEMQKRNRQTNERIEEIIRTTGKENAKYLIEKIKLHDMQEGKCLYSLEAIPLEDLLNNPFNYEVDHIIPRSVSFDNSFNNKVLVKQEENSKKGNRTPFQYLSSSDSKISYETFKKHILNLAKGKGRISKTKKEYLLEERDINRFSVQKDFINRNLVDTRYATRGLMNLLRSYFRVNNLDVKVKSINGGFTSFLRRKWKFKKERNKGYKHHAEDALIIANADFIFKEWKKLDKAKKVMENQMFEEKQAESMPEIETEQEYKEIFITPHQIKHIKDFKDYKYSHRVDKKPNRELINDTLYSTRKDDKGNTLIVNNLNGLYDKDNDKLKKLINKSPEKLLMYHHDPQTYQKLKLIMEQYGDEKNPLYKYYEETGNYLTKYSKKDNGPVIKKIKYYGNKLNAHLDITDDYPNSRNKVVKLSLKPYRFDVYLDNGVYKFVTVKNLDVIKKENYYEVNSKCYEEAKKLKKISNQAEFIASFYNNDLIKINGELYRVIGVNNDLLNRIEVNMIDITYREYLENMNDKRPPRIIKTIASKTQSIKKYSTDILGNLYEVKSKKHPQIIKKGSGGSKRTADGSEFEPKKKRKV

SEQ ID NO: 205 - protein, 1489 aa, Artificial Sequence
  Synthetic
MKRTADGSEFESPKKKRKVSEVEFSHEYWMRHALTLAKRAWDEREVPVGAVLVHNNRVIGEGWNRPIGRHDPTAHAEIMALRQGGLVMQNYRLIDATLYVTLEPCVMCAGAMIHSRIGRVVFGARDAKTGAAGSLMDVLHHPGMNHRVEITEGILADECAALLSDFFRMRRQEIKAQKKAQSSTDSGGSSGGSSGSETPGTSESATPESSGGSSGGSSEVEFSHEYWMRHALTLAKRARDEREVPVGAVLVLNNRVIGEGWNRAIGLHDPTAHAEIMALRQGGLVMQNYRLIDATLYVTFEPCVMCAGAMIHSRIGRVVFGVRNSKRGAAGSLMNVLNYPGMNHRVEITEGILADECAALLCDFYRMPRQVFNAQKKAQSSINSGGSSGGSSGSETPGTSESATPESSGGSSGGSGKRNYILGLAIGITSVGYGIIDYETRDVIDAGVRLFKEANVENNEGRRSKRGARRLKRRRRHRIQRVKKLLFDYNLLTDHSELSGINPYEARVKGLSQKLSEEEFSAALLHLAKRRGVHNVNEVEEDTGNELSTKEQISRNSKALEEKYVAELQLERLKKDGEVRGSINRFKTSDYVKEAKQLLKVQKAYHQLDQSFIDTYIDLLETRRTYYEGPGEGSPFGWKDIKEWYEMLMGHCTYFPEELRSVKYAYNADLYNALNDLNNLVITRDENEKLEYYEKFQIIENVFKQKKKPTLKQIAKEILVNEEDIKGYRVTSTGKPEFTNLKVYHDIKDITARKEIIENAELLDQIAKILTIYQSSEDIQEELTNLNSELTQEEIEQISNLKGYTGTHNLSLKAINLILDELWHTNDNQIAIFNRLKLVPKKVDLSQQKEIPTTLVDDFILSPVVKRSFIQSIKVINAIIKKYGLPNDIIIELAREKNSKDAQKMINEMQKRNRQTNERIEEIIRTTGKENAKYLIEKIKLHDMQEGKCLYSLEAIPLEDLLNNPFNYEVDHIIPRSVSFDNSFNNKVLVKQEENSKKGNRTPFQYLSSSDSKISYETFKKHILNLAKGKGRISKTKKEYLLEERDINRFSVQKDFINRNLVDTRYATRGLMNLLRSYFRVNNLDVKVKSINGGFTSFLRRKWKFKKERNKGYKHHAEDALIIANADFIFKEWKKLDKAKKVMENQMFEEKQAESMPEIETEQEYKEIFITPHQIKHIKDFKDYKYSHRVDKKPNRELINDTLYSTRKDDKGNTLIVNNLNGLYDKDNDKLKKLINKSPEKLLMYHHDPQTYQKLKLIMEQYGDEKNPLYKYYEETGNYLTKYSKKDNGPVIKKIKYYGNKLNAHLDITDDYPNSRNKVVKLSLKPYRFDVYLDNGVYKFVTVKNLDVIKKENYYEVNSKCYEEAKKLKKISNQAEFIASFYNNDLIKINGELYRVIGVNNDLLNRIEVNMIDITYREYLENMNDKRPPRIIKTIASKTQSIKKYSTDILGNLYEVKSKKHPQIIKKGSGGSKRTADGSEFEPKKKRKV

SEQ ID NO: 206 - protein, 1464 aa, Artificial Sequence
  Synthetic
MKRTADGSEFESPKKKRKVSEVEFSHEYWMRHALTLAKRARDEREVPVGAVLVLNNRVIGEGWNRAIGLHDPTAHAEIMALRQGGLVMQNYRLIDATLYVTFEPCVMCAGAMIHSRIGRVVFGVRNSKRGAAGSLMNVLNYPGMNHRVEITEGILADECAALLCDFYRMPRQVFNAQKKAQSSINSGGSSGGSSGSETPGTSESATPESSGGSSGGSSKLEKFTNCYSLSKTLRFKAIPVGKTQENIDNKRLLVEDEKRAEDYKGVKKLLDRYYLSFINDVLHSIKLKNLNNYISLFRKKTRTEKENKELENLEINLRKEIAKAFKGNEGYKSLFKKDIIETILPEFLDDKDEIALVNSFNGFTTAFTGFFDNRENMFSEEAKSTSIAFRCINENLTRYISNMDIFEKVDAIFDKHEVQEIKEKILNSDYDVEDFFEGEFFNFVLTQEGIDVYNAIIGGFVTESGEKIKGLNEYINLYNQKTKQKLPKFKPLYKQVLSDRESLSFYGEGYTSDEEVLEVFRNTLNKNSEIFSSIKKLEKLFKNFDEYSSAGIFVKNGPAISTISKDIFGEWNVIRDKWNAEYDDIHLKKKAVVTEKYEDDRRKSFKKIGSFSLEQLQEYADADLSVVEKLKEIIIQKVDEIYKVYGSSEKLFDADFVLEKSLKKNDAVVAIMKDLLDSVKSFENYIKAFFGEGKETNRDESFYGDFVLAYDILLKVDHIYDAIRNYVTQKPYSKDKFKLYFQNPQFMGGWDKDKETDYRATILRYGSKYYLAIMDKKYAKCLQKIDKDDVNGNYEKINYKLLPGPNKMLPKVFFSKKWMAYYNPSEDIQKIYKNGTFKKGDMFNLNDCHKLIDFFKDSISRYPKWSNAYDFNFSETEKYKDIAGFYREVEEQGYKVSFESASKKEVDKLVEEGKLYMFQIYNKDFSDKSHGTPNLHTMYFKLLFDENNHGQIRLSGGAELFMRRASLKKEELVVHPANSPIANKNPDNPKKTTTLSYDVYKDKRFSEDQYELHIPIAINKCPKNIFKINTEVRVLLKHDDNPYVIGIARGERNLLYIVVVDGKGNIVEQYSLNEIINNFNGIRIKTDYHSLLDKKEKERFEARQNWTSIENIKELKAGYISQVVHKICELVEKYDAVIALEDLNSGFKNSRVKVEKQVYQKFEKMLIDKLNYMVDKKSNPCATGGALKGYQITNKFESFKSMSTQNGFIFYIPAWLTSKIDPSTGFVNLLKTKYTSIADSKKFISSFDRIMYVPEEDLFEFALDYKNFSRTDADYIKKWKLYSYGNRIRIFRNPKKNNVFDWEEVCLTSAYKELFNKYGINYQQGDIRALLCEQSDKAFYSSFMALMSLMLQMRNSITGRTDVDFLISPVKNSDGIFYDSRNYEAQENAILPKNADANGAYNIARKVLWAIGQFKKAEDEKLDKVKIAISNKEWLEYAQTSVKSGGSKRTADGSEFEPKKKRKV

SEQ ID NO: 207 - protein, 1662 aa, Artificial Sequence
  Synthetic
MKRTADGSEFESPKKKRKVSEVEFSHEYWMRHALTLAKRAWDEREVPVGAVLVHNNRVIGEGWNRPIGRHDPTAHAEIMALRQGGLVMQNYRLIDATLYVTLEPCVMCAGAMIHSRIGRVVFGARDAKTGAAGSLMDVLHHPGMNHRVEITEGILADECAALLSDFFRMRRQEIKAQKKAQSSTDSGGSSGGSSGSETPGTSESATPESSGGSSGGSSEVEFSHEYWMRHALTLAKRARDEREVPVGAVLVLNNRVIGEGWNRAIGLHDPTAHAEIMALRQGGLVMQNYRLIDATLYVTFEPCVMCAGAMIHSRIGRVVFGVRNSKRGAAGSLMNVLNYPGMNHRVEITEGILADECAALLCDFYRMPRQVFNAQKKAQSSINSGGSSGGSSGSETPGTSESATPESSGGSSGGSSKLEKFTNCYSLSKTLRFKAIPVGKTQENIDNKRLLVEDEKRAEDYKGVKKLLDRYYLSFINDVLHSIKLKNLNNYISLFRKKTRTEKENKELENLEINLRKEIAKAFKGNEGYKSLFKKDIIETILPEFLDDKDEIALVNSFNGFTTAFTGFFDNRENMFSEEAKSTSIAFRCINENLTRYISNMDIFEKVDAIFDKHEVQEIKEKILNSDYDVEDFFEGEFFNFVLTQEGIDVYNAIIGGFVTESGEKIKGLNEYINLYNQKTKQKLPKFKPLYKQVLSDRESLSFYGEGYTSDEEVLEVFRNTLNKNSEIFSSIKKLEKLFKNFDEYSSAGIFVKNGPAISTISKDIFGEWNVIRDKWNAEYDDIHLKKKAVVTEKYEDDRRKSFKKIGSFSLEQLQEYADADLSVVEKLKEIIIQKVDEIYKVYGSSEKLFDADFVLEKSLKKNDAVVAIMKDLLDSVKSFENYIKAFFGEGKETNRDESFYGDFVLAYDILLKVDHIYDAIRNYVTQKPYSKDKFKLYFQNPQFMGGWDKDKETDYRATILRYGSKYYLAIMDKKYAKCLQKIDKDDVNGNYEKINYKLLPGPNKMLPKVFFSKKWMAYYNPSEDIQKIYKNGTFKKGDMFNLNDCHKLIDFFKDSISRYPKWSNAYDFNFSETEKYKDIAGFYREVEEQGYKVSFESASKKEVDKLVEEGKLYMFQIYNKDFSDKSHGTPNLHTMYFKLLFDENNHGQIRLSGGAELFMRRASLKKEELVVHPANSPIANKNPDNPKKTTTLSYDVYKDKRFSEDQYELHIPIAINKCPKNIFKINTEVRVLLKHDDNPYVIGIARGERNLLYIVVVDGKGNIVEQYSLNEIINNFNGIRIKTDYHSLLDKKEKERFEARQNWTSIENIKELKAGYISQVVHKICELVEKYDAVIALEDLNSGFKNSRVKVEKQVYQKFEKMLIDKLNYMVDKKSNPCATGGALKGYQITNKFESFKSMSTQNGFIFYIPAWLTSKIDPSTGFVNLLKTKYTSIADSKKFISSFDRIMYVPEEDLFEFALDYKNFSRTDADYIKKWKLYSYGNRIRIFRNPKKNNVFDWEEVCLTSAYKELFNKYGINYQQGDIRALLCEQSDKAFYSSFMALMSLMLQMRNSITGRTDVDFLISPVKNSDGIFYDSRNYEAQENAILPKNADANGAYNIARKVLWAIGQFKKAEDEKLDKVKIAISNKEWLEYAQTSVKSGGSKRTADGSEFEPKKKRKV

SEQ ID NO: 208 - protein, 1662 aa, Artificial Sequence
  Synthetic
MKRTADGSEFESPKKKRKVSEVEFSHEYWMRHALTLAKRAWDEREVPVGAVLVHNNRVIGEGWNRPIGRHDPTAHAEIMALRQGGLVMQNYRLIDATLYVTLEPCVMCAGAMIHSRIGRVVFGARDAKTGAAGSLMDVLHHPGMNHRVEITEGILADECAALLSDFFRMRRQEIKAQKKAQSSTDSGGSSGGSSGSETPGTSESATPESSGGSSGGSSEVEFSHEYWMRHALTLAKRARDEREVPVGAVLVLNNRVIGEGWNRAIGLHDPTAHAEIMALRQGGLVMQNYRLIDATLYVTFEPCVMCAGAMIHSRIGRVVFGVRNAKTGAAGSLMDVLHYPGMNHRVEITEGILADECAALLCYFFRMPRQVFNAQKKAQSSTDSGGSSGGSSGSETPGTSESATPESSGGSSGGSSKLEKFTNCYSLSKTLRFKAIPVGKTQENIDNKRLLVEDEKRAEDYKGVKKLLDRYYLSFINDVLHSIKLKNLNNYISLFRKKTRTEKENKELENLEINLRKEIAKAFKGNEGYKSLFKKDIIETILPEFLDDKDEIALVNSFNGFTTAFTGFFDNRENMFSEEAKSTSIAFRCINENLTRYISNMDIFEKVDAIFDKHEVQEIKEKILNSDYDVEDFFEGEFFNFVLTQEGIDVYNAIIGGFVTESGEKIKGLNEYINLYNQKTKQKLPKFKPLYKQVLSDRESLSFYGEGYTSDEEVLEVFRNTLNKNSEIFSSIKKLEKLFKNFDEYSSAGIFVKNGPAISTISKDIFGEWNVIRDKWNAEYDDIHLKKKAVVTEKYEDDRRKSFKKIGSFSLEQLQEYADADLSVVEKLKEIIIQKVDEIYKVYGSSEKLFDADFVLEKSLKKNDAVVAIMKDLLDSVKSFENYIKAFFGEGKETNRDESFYGDFVLAYDILLKVDHIYDAIRNYVTQKPYSKDKFKLYFQNPQFMGGWDKDKETDYRATILRYGSKYYLAIMDKKYAKCLQKIDKDDVNGNYEKINYKLLPGPNKMLPKVFFSKKWMAYYNPSEDIQKIYKNGTFKKGDMFNLNDCHKLIDFFKDSISRYPKWSNAYDFNFSETEKYKDIAGFYREVEEQGYKVSFESASKKEVDKLVEEGKLYMFQIYNKDFSDKSHGTPNLHTMYFKLLFDENNHGQIRLSGGAELFMRRASLKKEELVVHPANSPIANKNPDNPKKTTTLSYDVYKDKRFSEDQYELHIPIAINKCPKNIFKINTEVRVLLKHDDNPYVIGIARGERNLLYIVVVDGKGNIVEQYSLNEIINNFNGIRIKTDYHSLLDKKEKERFEARQNWTSIENIKELKAGYISQVVHKICELVEKYDAVIALEDLNSGFKNSRVKVEKQVYQKFEKMLIDKLNYMVDKKSNPCATGGALKGYQITNKFESFKSMSTQNGFIFYIPAWLTSKIDPSTGFVNLLKTKYTSIADSKKFISSFDRIMYVPEEDLFEFALDYKNFSRTDADYIKKWKLYSYGNRIRIFRNPKKNNVFDWEEVCLTSAYKELFNKYGINYQQGDIRALLCEQSDKAFYSSFMALMSLMLQMRNSITGRTDVDFLISPVKNSDGIFYDSRNYEAQENAILPKNADANGAYNIARKVLWAIGQFKKAEDEKLDKVKIAISNKEWLEYAQTSVKSGGSKRTADGSEFEPKKKRKV

SEQ ID NO: 209 - protein, 1545 aa, Artificial Sequence
  Synthetic
MKRTADGSEFESPKKKRKVSEVEFSHEYWMRHALTLAKRARDEREVPVGAVLVLNNRVIGEGWNRAIGLHDPTAHAEIMALRQGGLVMQNYRLIDATLYVTFEPCVMCAGAMIHSRIGRVVFGVRNSKRGAAGSLMNVLNYPGMNHRVEITEGILADECAALLCDFYRMPRQVFNAQKKAQSSINSGGSSGGSSGSETPGTSESATPESSGGSSGGSMTQFEGFTNLYQVSKTLRFELIPQGKTLKHIQEQGFIEEDKARNDHYKELKPIIDRIYKTYADQCLQLVQLDWENLSAAIDSYRKEKTEETRNALIEEQATYRNAIHDYFIGRTDNLTDAINKRHAEIYKGLFKAELFNGKVLKQLGTVTTTEHENALLRSFDKFTTYFSGFYRNRKNVFSAEDISTAIPHRIVQDNFPKFKENCHIFTRLITAVPSLREHFENVKKAIGIFVSTSIEEVFSFPFYNQLLTQTQIDLYNQLLGGISREAGTEKIKGLNEVLNLAIQKNDETAHIIASLPHRFIPLFKQILSDRNTLSFILEEFKSDEEVIQSFCKYKTLLRNENVLETAEALFNELNSIDLTHIFISHKKLETISSALCDHWDTLRNALYERRISELTGKITKSAKEKVQRSLKHEDINLQEIISAAGKELSEAFKQKTSEILSHAHAALDQPLPTTLKKQEEKEILKSQLDSLLGLYHLLDWFAVDESNEVDPEFSARLTGIKLEMEPSLSFYNKARNYATKKPYSVEKFKLNFQMPTLARGWDVNREKNNGAILFVKNGLYYLGIMPKQKGRYKALSFEPTEKTSEGFDKMYYDYFPDAAKMIPKCSTQLKAVTAHFQTHTTPILLSNNFIEPLEITKEIYDLNNPEKEPKKFQTAYAKKTGDQKGYREALCKWIDFTRDFLSKYTKTTSIDLSSLRPSSQYKDLGEYYAELNPLLYHISFQRIAEKEIMDAVETGKLYLFQIYNKDFAKGHHGKPNLHTLYWTGLFSPENLAKTSIKLNGQAELFYRPKSRMKRMAHRLGEKMLNKKLKDQKTPIPDTLYQELYDYVNHRLSHDLSDEARALLPNVITKEVSHEIIKDRRFTSDKFFFHVPITLNYQAANSPSKFNQRVNAYLKEHPETPIIGIARGERNLIYITVIDSTGKILEQRSLNTIQQFDYQKKLDNREKERVAARQAWSVVGTIKDLKQGYLSQVIHEIVDLMIHYQAVVVLENLNFGFKSKRTGIAEKAVYQQFEKMLIDKLNCLVLKDYPAEKVGGVLNPYQLTDQFTSFAKMGTQSGFLFYVPAPYTSKIDPLTGFVDPFVWKTIKNHESRKHFLEGFDFLHYDVKTGDFILHFKMNRNLSFQRGLPGFMPAWDIVFEKNETQFDAKGTPFIAGKRIVPVIENHRFTGRYRDLYPANELIALLEEKGIVFRDGSNILPKLLENDDSHAIDTMVALIRSVLQMRNSNAATGEDYINSPVRDLNGVCFDSRFQNPEWPMDADANGAYHIALKGQLLLNHLKESKDLKLQNGISNQDWLAYIQELRNSGGSKRTADGSEFEPKKKRKV

SEQ ID NO: 210 - protein, 1743 aa, Artificial Sequence
  Synthetic
MKRTADGSEFESPKKKRKVSEVEFSHEYWMRHALTLAKRAWDEREVPVGAVLVHNNRVIGEGWNRPIGRHDPTAHAEIMALRQGGLVMQNYRLIDATLYVTLEPCVMCAGAMIHSRIGRVVFGARDAKTGAAGSLMDVLHHPGMNHRVEITEGILADECAALLSDFFRMRRQEIKAQKKAQSSTDSGGSSGGSSGSETPGTSESATPESSGGSSGGSSEVEFSHEYWMRHALTLAKRARDEREVPVGAVLVLNNRVIGEGWNRAIGLHDPTAHAEIMALRQGGLVMQNYRLIDATLYVTFEPCVMCAGAMIHSRIGRVVFGVRNSKRGAAGSLMNVLNYPGMNHRVEITEGILADECAALLCDFYRMPRQVFNAQKKAQSSINSGGSSGGSSGSETPGTSESATPESSGGSSGGSMTQFEGFTNLYQVSKTLRFELIPQGKTLKHIQEQGFIEEDKARNDHYKELKPIIDRIYKTYADQCLQLVQLDWENLSAAIDSYRKEKTEETRNALIEEQATYRNAIHDYFIGRTDNLTDAINKRHAEIYKGLFKAELFNGKVLKQLGTVTTTEHENALLRSFDKFTTYFSGFYRNRKNVFSAEDISTAIPHRIVQDNFPKFKENCHIFTRLITAVPSLREHFENVKKAIGIFVSTSIEEVFSFPFYNQLLTQTQIDLYNQLLGGISREAGTEKIKGLNEVLNLAIQKNDETAHIIASLPHRFIPLFKQILSDRNTLSFILEEFKSDEEVIQSFCKYKTLLRNENVLETAEALFNELNSIDLTHIFISHKKLETISSALCDHWDTLRNALYERRISELTGKITKSAKEKVQRSLKHEDINLQEIISAAGKELSEAFKQKTSEILSHAHAALDQPLPTTLKKQEEKEILKSQLDSLLGLYHLLDWFAVDESNEVDPEFSARLTGIKLEMEPSLSFYNKARNYATKKPYSVEKFKLNFQMPTLARGWDVNREKNNGAILFVKNGLYYLGIMPKQKGRYKALSFEPTEKTSEGFDKMYYDYFPDAAKMIPKCSTQLKAVTAHFQTHTTPILLSNNFIEPLEITKEIYDLNNPEKEPKKFQTAYAKKTGDQKGYREALCKWIDFTRDFLSKYTKTTSIDLSSLRPSSQYKDLGEYYAELNPLLYHISFQRIAEKEIMDAVETGKLYLFQIYNKDFAKGHHGKPNLHTLYWTGLFSPENLAKTSIKLNGQAELFYRPKSRMKRMAHRLGEKMLNKKLKDQKTPIPDTLYQELYDYVNHRLSHDLSDEARALLPNVITKEVSHEIIKDRRFTSDKFFFHVPITLNYQAANSPSKFNQRVNAYLKEHPETPIIGIARGERNLIYITVIDSTGKILEQRSLNTIQQFDYQKKLDNREKERVAARQAWSVVGTIKDLKQGYLSQVIHEIVDLMIHYQAVVVLENLNFGFKSKRTGIAEKAVYQQFEKMLIDKLNCLVLKDYPAEKVGGVLNPYQLTDQFTSFAKMGTQSGFLFYVPAPYTSKIDPLTGFVDPFVWKTIKNHESRKHFLEGFDFLHYDVKTGDFILHFKMNRNLSFQRGLPGFMPAWDIVFEKNETQFDAKGTPFIAGKRIVPVIENHRFTGRYRDLYPANELIALLEEKGIVFRDGSNILPKLLENDDSHAIDTMVALIRSVLQMRNSNAATGEDYINSPVRDLNGVCFDSRFQNPEWPMDADANGAYHIALKGQLLLNHLKESKDLKLQNGISNQDWLAYIQELRNSGGSKRTADGSEFEPKKKRKV

SEQ ID NO: 211 - protein, 1743 aa, Artificial Sequence
  Synthetic
MKRTADGSEFESPKKKRKVSEVEFSHEYWMRHALTLAKRAWDEREVPVGAVLVHNNRVIGEGWNRPIGRHDPTAHAEIMALRQGGLVMQNYRLIDATLYVTLEPCVMCAGAMIHSRIGRVVFGARDAKTGAAGSLMDVLHHPGMNHRVEITEGILADECAALLSDFFRMRRQEIKAQKKAQSSTDSGGSSGGSSGSETPGTSESATPESSGGSSGGSSEVEFSHEYWMRHALTLAKRARDEREVPVGAVLVLNNRVIGEGWNRAIGLHDPTAHAEIMALRQGGLVMQNYRLIDATLYVTFEPCVMCAGAMIHSRIGRVVFGVRNAKTGAAGSLMDVLHYPGMNHRVEITEGILADECAALLCYFFRMPRQVFNAQKKAQSSTDSGGSSGGSSGSETPGTSESATPESSGGSSGGSMTQFEGFTNLYQVSKTLRFELIPQGKTLKHIQEQGFIEEDKARNDHYKELKPIIDRIYKTYADQCLQLVQLDWENLSAAIDSYRKEKTEETRNALIEEQATYRNAIHDYFIGRTDNLTDAINKRHAEIYKGLFKAELFNGKVLKQLGTVTTTEHENALLRSFDKFTTYFSGFYRNRKNVFSAEDISTAIPHRIVQDNFPKFKENCHIFTRLITAVPSLREHFENVKKAIGIFVSTSIEEVFSFPFYNQLLTQTQIDLYNQLLGGISREAGTEKIKGLNEVLNLAIQKNDETAHIIASLPHRFIPLFKQILSDRNTLSFILEEFKSDEEVIQSFCKYKTLLRNENVLETAEALFNELNSIDLTHIFISHKKLETISSALCDHWDTLRNALYERRISELTGKITKSAKEKVQRSLKHEDINLQEIISAAGKELSEAFKQKTSEILSHAHAALDQPLPTTLKKQEEKEILKSQLDSLLGLYHLLDWFAVDESNEVDPEFSARLTGIKLEMEPSLSFYNKARNYATKKPYSVEKFKLNFQMPTLARGWDVNREKNNGAILFVKNGLYYLGIMPKQKGRYKALSFEPTEKTSEGFDKMYYDYFPDAAKMIPKCSTQLKAVTAHFQTHTTPILLSNNFIEPLEITKEIYDLNNPEKEPKKFQTAYAKKTGDQKGYREALCKWIDFTRDFLSKYTKTTSIDLSSLRPSSQYKDLGEYYAELNPLLYHISFQRIAEKEIMDAVETGKLYLFQIYNKDFAKGHHGKPNLHTLYWTGLFSPENLAKTSIKLNGQAELFYRPKSRMKRMAHRLGEKMLNKKLKDQKTPIPDTLYQELYDYVNHRLSHDLSDEARALLPNVITKEVSHEIIKDRRFTSDKFFFHVPITLNYQAANSPSKFNQRVNAYLKEHPETPIIGIARGERNLIYITVIDSTGKILEQRSLNTIQQFDYQKKLDNREKERVAARQAWSVVGTIKDLKQGYLSQVIHEIVDLMIHYQAVVVLENLNFGFKSKRTGIAEKAVYQQFEKMLIDKLNCLVLKDYPAEKVGGVLNPYQLTDQFTSFAKMGTQSGFLFYVPAPYTSKIDPLTGFVDPFVWKTIKNHESRKHFLEGFDFLHYDVKTGDFILHFKMNRNLSFQRGLPGFMPAWDIVFEKNETQFDAKGTPFIAGKRIVPVIENHRFTGRYRDLYPANELIALLEEKGIVFRDGSNILPKLLENDDSHAIDTMVALIRSVLQMRNSNAATGEDYINSPVRDLNGVCFDSRFQNPEWPMDADANGAYHIALKGQLLLNHLKESKDLKLQNGISNQDWLAYIQELRNSGGSKRTADGSEFEPKKKRKV

SEQ ID NO: 212 - protein, 1605 aa, Artificial Sequence
  Synthetic
MKRTADGSEFESPKKKRKVSEVEFSHEYWMRHALTLAKRARDEREVPVGAVLVLNNRVIGEGWNRAIGLHDPTAHAEIMALRQGGLVMQNYRLIDATLYVTFEPCVMCAGAMIHSRIGRVVFGVRNSKRGAAGSLMNVLNYPGMNHRVEITEGILADECAALLCDFYRMPRQVFNAQKKAQSSINSGGSSGGSSGSETPGTSESATPESSGGSSGGSDKKYSIGLAIGTNSVGWAVITDEYKVPSKKFKVLGNTDRHSIKKNLIGALLFDSGETAEATRLKRTARRRYTRRKNRICYLQEIFSNEMAKVDDSFFHRLEESFLVEEDKKHERHPIFGNIVDEVAYHEKYPTIYHLRKKLVDSTDKADLRLIYLALAHMIKFRGHFLIEGDLNPDNSDVDKLFIQLVQTYNQLFEENPINASGVDAKAILSARLSKSRRLENLIAQLPGEKKNGLFGNLIALSLGLTPNFKSNFDLAEDAKLQLSKDTYDDDLDNLLAQIGDQYADLFLAAKNLSDAILLSDILRVNTEITKAPLSASMIKRYDEHHQDLTLLKALVRQQLPEKYKEIFFDQSKNGYAGYIDGGASQEEFYKFIKPILEKMDGTEELLVKLNREDLLRKQRTFDNGSIPHQIHLGELHAILRRQEDFYPFLKDNREKIEKILTFRIPYYVGPLARGNSRFAWMTRKSEETITPWNFEEVVDKGASAQSFIERMTNFDKNLPNEKVLPKHSLLYEYFTVYNELTKVKYVTEGMRKPAFLSGEQKKAIVDLLFKTNRKVTVKQLKEDYFKKIECFDSVEISGVEDRFNASLGTYHDLLKIIKDKDFLDNEENEDILEDIVLTLTLFEDREMIEERLKTYAHLFDDKVMKQLKRRRYTGWGRLSRKLINGIRDKQSGKTILDFLKSDGFANRNFMQLIHDDSLTFKEDIQKAQVSGQGDSLHEHIANLAGSPAIKKGILQTVKVVDELVKVMGRHKPENIVIEMARENQTTQKGQKNSRERMKRIEEGIKELGSQILKEHPVENTQLQNEKLYLYYLQNGRDMYVDQELDINRLSDYDVDHIVPQSFLKDDSIDNKVLTRSDKNRGKSDNVPSEEVVKKMKNYWRQLLNAKLITQRKFDNLTKAERGGLSELDKAGFIKRQLVETRQITKHVAQILDSRMNTKYDENDKLIREVKVITLKSKLVSDFRKDFQFYKVREINNYHHAHDAYLNAVVGTALIKKYPKLESEFVYGDYKVYDVRKMIAKSEQEIGKATAKYFFYSNIMNFFKTEITLANGEIRKRPLIETNGETGEIVWDKGRDFATVRKVLSMPQVNIVKKTEVQTGGFSKESIRPKRNSDKLIARKKDWDPKKYGGFVSPTVAYSVLVVAKVEKGKSKKLKSVKELLGITIMERSSFEKNPIDFLEAKGYKEVKKDLIIKLPKYSLFELENGRKRMLASARFLQKGNELALPSKYVNFLYLASHYEKLKGSPEDNEQKQLFVEQHKHYLDEIIEQISEFSKRVILADANLDKVLSAYNKHRDKPIREQAENIIHLFTLTNLGAPRAFKYFDTTIDRKVYRSTKEVLDATLIHQSITGLYETRIDLSQLGGDSGGSKRTADGSEFEPKKKRKV

SEQ ID NO: 213 - protein, 1803 aa, Artificial Sequence
  Synthetic
MKRTADGSEFESPKKKRKVSEVEFSHEYWMRHALTLAKRAWDEREVPVGAVLVHNNRVIGEGWNRPIGRHDPTAHAEIMALRQGGLVMQNYRLIDATLYVTLEPCVMCAGAMIHSRIGRVVFGARDAKTGAAGSLMDVLHHPGMNHRVEITEGILADECAALLSDFFRMRRQEIKAQKKAQSSTDSGGSSGGSSGSETPGTSESATPESSGGSSGGSSEVEFSHEYWMRHALTLAKRARDEREVPVGAVLVLNNRVIGEGWNRAIGLHDPTAHAEIMALRQGGLVMQNYRLIDATLYVTFEPCVMCAGAMIHSRIGRVVFGVRNSKRGAAGSLMNVLNYPGMNHRVEITEGILADECAALLCDFYRMPRQVFNAQKKAQSSINSGGSSGGSSGSETPGTSESATPESSGGSSGGSDKKYSIGLAIGTNSVGWAVITDEYKVPSKKFKVLGNTDRHSIKKNLIGALLFDSGETAEATRLKRTARRRYTRRKNRICYLQEIFSNEMAKVDDSFFHRLEESFLVEEDKKHERHPIFGNIVDEVAYHEKYPTIYHLRKKLVDSTDKADLRLIYLALAHMIKFRGHFLIEGDLNPDNSDVDKLFIQLVQTYNQLFEENPINASGVDAKAILSARLSKSRRLENLIAQLPGEKKNGLFGNLIALSLGLTPNFKSNFDLAEDAKLQLSKDTYDDDLDNLLAQIGDQYADLFLAAKNLSDAILLSDILRVNTEITKAPLSASMIKRYDEHHQDLTLLKALVRQQLPEKYKEIFFDQSKNGYAGYIDGGASQEEFYKFIKPILEKMDGTEELLVKLNREDLLRKQRTFDNGSIPHQIHLGELHAILRRQEDFYPFLKDNREKIEKILTFRIPYYVGPLARGNSRFAWMTRKSEETITPWNFEEVVDKGASAQSFIERMTNFDKNLPNEKVLPKHSLLYEYFTVYNELTKVKYVTEGMRKPAFLSGEQKKAIVDLLFKTNRKVTVKQLKEDYFKKIECFDSVEISGVEDRFNASLGTYHDLLKIIKDKDFLDNEENEDILEDIVLTLTLFEDREMIEERLKTYAHLFDDKVMKQLKRRRYTGWGRLSRKLINGIRDKQSGKTILDFLKSDGFANRNFMQLIHDDSLTFKEDIQKAQVSGQGDSLHEHIANLAGSPAIKKGILQTVKVVDELVKVMGRHKPENIVIEMARENQTTQKGQKNSRERMKRIEEGIKELGSQILKEHPVENTQLQNEKLYLYYLQNGRDMYVDQELDINRLSDYDVDHIVPQSFLKDDSIDNKVLTRSDKNRGKSDNVPSEEVVKKMKNYWRQLLNAKLITQRKFDNLTKAERGGLSELDKAGFIKRQLVETRQITKHVAQILDSRMNTKYDENDKLIREVKVITLKSKLVSDFRKDFQFYKVREINNYHHAHDAYLNAVVGTALIKKYPKLESEFVYGDYKVYDVRKMIAKSEQEIGKATAKYFFYSNIMNFFKTEITLANGEIRKRPLIETNGETGEIVWDKGRDFATVRKVLSMPQVNIVKKTEVQTGGFSKESIRPKRNSDKLIARKKDWDPKKYGGFVSPTVAYSVLVVAKVEKGKSKKLKSVKELLGITIMERSSFEKNPIDFLEAKGYKEVKKDLIIKLPKYSLFELENGRKRMLASARFLQKGNELALPSKYVNFLYLASHYEKLKGSPEDNEQKQLFVEQHKHYLDEIIEQISEFSKRVILADANLDKVLSAYNKHRDKPIREQAENIIHLFTLTNLGAPRAFKYFDTTIDRKVYRSTKEVLDATLIHQSITGLYETRIDLSQLGGDSGGSKRTADGSEFEPKKKRKV

SEQ ID NO: 214 - protein, 1291 aa, Artificial Sequence; identical to SEQ ID NO: 204
  Synthetic

SEQ ID NO: 215 - protein, 1489 aa, Artificial Sequence; identical to SEQ ID NO: 205
  Synthetic

SEQ ID NO: 216 - protein, 1626 aa, Artificial Sequence
  Synthetic
MKRTADGSEFESPKKKRKVSEVEFSHEYWMRHALTLAKRARDEREVPVGAVLVLNNRVIGEGWNRAIGLHDPTAHAEIMALRQGGLVMQNYRLIDATLYVTFEPCVMCAGAMIHSRIGRVVFGVRNSKRGAAGSLMNVLNYPGMNHRVEITEGILADECAALLCDFYRMPRQVFNAQKKAQSSINSGGSSGGSSGSETPGTSESATPESSGGSSGGSEIGKATAKYFFYSNIMNFFKTEITLANGEIRKRPLIETNGETGEIVWDKGRDFATVRKVLSMPQVNIVKKTEVQTGGFSKESILPKRNSDKLIARKKDWDPKKYGGFDSPTVAYSVLVVAKVEKGKSKKLKSVKELLGITIMERSSFEKNPIDFLEAKGYKEVKKDLIIKLPKYSLFELENGRKRMLASAGELQKGNELALPSKYVNFLYLASHYEKLKGSPEDNEQKQLFVEQHKHYLDEIIEQISEFSKRVILADANLDKVLSAYNKHRDKPIREQAENIIHLFTLTNLGAPAAFKYFDTTIDRKRYTSTKEVLDATLIHQSITGLYETRIDLSQLGGDGGSGGSGGSGGSGGSGGSGGMDKKYSIGLAIGTNSVGWAVITDEYKVPSKKFKVLGNTDRHSIKKNLIGALLFDSGETAEATRLKRTARRRYTRRKNRICYLQEIFSNEMAKVDDSFFHRLEESFLVEEDKKHERHPIFGNIVDEVAYHEKYPTIYHLRKKLVDSTDKADLRLIYLALAHMIKFRGHFLIEGDLNPDNSDVDKLFIQLVQTYNQLFEENPINASGVDAKAILSARLSKSRRLENLIAQLPGEKKNGLFGNLIALSLGLTPNFKSNFDLAEDAKLQLSKDTYDDDLDNLLAQIGDQYADLFLAAKNLSDAILLSDILRVNTEITKAPLSASMIKRYDEHHQDLTLLKALVRQQLPEKYKEIFFDQSKNGYAGYIDGGASQEEFYKFIKPILEKMDGTEELLVKLNREDLLRKQRTFDNGSIPHQIHLGELHAILRRQEDFYPFLKDNREKIEKILTFRIPYYVGPLARGNSRFAWMTRKSEETITPWNFEEVVDKGASAQSFIERMTNFDKNLPNEKVLPKHSLLYEYFTVYNELTKVKYVTEGMRKPAFLSGEQKKAIVDLLFKTNRKVTVKQLKEDYFKKIECFDSVEISGVEDRFNASLGTYHDLLKIIKDKDFLDNEENEDILEDIVLTLTLFEDREMIEERLKTYAHLFDDKVMKQLKRRRYTGWGRLSRKLINGIRDKQSGKTILDFLKSDGFANRNFMQLIHDDSLTFKEDIQKAQVSGQGDSLHEHIANLAGSPAIKKGILQTVKVVDELVKVMGRHKPENIVIEMARENQTTQKGQKNSRERMKRIEEGIKELGSQILKEHPVENTQLQNEKLYLYYLQNGRDMYVDQELDINRLSDYDVDHIVPQSFLKDDSIDNKVLTRSDKNRGKSDNVPSEEVVKKMKNYWRQLLNAKLITQRKFDNLTKAERGGLSELDKAGFIKRQLVETRQITKHVAQILDSRMNTKYDENDKLIREVKVITLKSKLVSDFRKDFQFYKVREINNYHHAHDAYLNAVVGTALIKKYPKLESEFVYGDYKVYDVRKMIAKSEQSGGSKRTADGSEFEPKKKRKV

SEQ ID NO: 217 - protein, 1824 aa, Artificial Sequence
  Synthetic
MKRTADGSEFESPKKKRKVSEVEFSHEYWMRHALTLAKRAWDEREVPVGAVLVHNNRVIGEGWNRPIGRHDPTAHAEIMALRQGGLVMQNYRLIDATLYVTLEPCVMCAGAMIHSRIGRVVFGARDAKTGAAGSLMDVLHHPGMNHRVEITEGILADECAALLSDFFRMRRQEIKAQKKAQSSTDSGGSSGGSSGSETPGTSESATPESSGGSSGGSSEVEFSHEYWMRHALTLAKRARDEREVPVGAVLVLNNRVIGEGWNRAIGLHDPTAHAEIMALRQGGLVMQNYRLIDATLYVTFEPCVMCAGAMIHSRIGRVVFGVRNSKRGAAGSLMNVLNYPGMNHRVEITEGILADECAALLCDFYRMPRQVFNAQKKAQSSINSGGSSGGSSGSETPGTSESATPESSGGSSGGSEIGKATAKYFFYSNIMNFFKTEITLANGEIRKRPLIETNGETGEIVWDKGRDFATVRKVLSMPQVNIVKKTEVQTGGFSKESILPKRNSDKLIARKKDWDPKKYGGFDSPTVAYSVLVVAKVEKGKSKKLKSVKELLGITIMERSSFEKNPIDFLEAKGYKEVKKDLIIKLPKYSLFELENGRKRMLASAGELQKGNELALPSKYVNFLYLASHYEKLKGSPEDNEQKQLFVEQHKHYLDEIIEQISEFSKRVILADANLDKVLSAYNKHRDKPIREQAENIIHLFTLTNLGAPAAFKYFDTTIDRKRYTSTKEVLDATLIHQSITGLYETRIDLSQLGGDGGSGGSGGSGGSGGSGGSGGMDKKYSIGLAIGTNSVGWAVITDEYKVPSKKFKVLGNTDRHSIKKNLIGALLFDSGETAEATRLKRTARRRYTRRKNRICYLQEIFSNEMAKVDDSFFHRLEESFLVEEDKKHERHPIFGNIVDEVAYHEKYPTIYHLRKKLVDSTDKADLRLIYLALAHMIKFRGHFLIEGDLNPDNSDVDKLFIQLVQTYNQLFEENPINASGVDAKAILSARLSKSRRLENLIAQLPGEKKNGLFGNLIALSLGLTPNFKSNFDLAEDAKLQLSKDTYDDDLDNLLAQIGDQYADLFLAAKNLSDAILLSDILRVNTEITKAPLSASMIKRYDEHHQDLTLLKALVRQQLPEKYKEIFFDQSKNGYAGYIDGGASQEEFYKFIKPILEKMDGTEELLVKLNREDLLRKQRTFDNGSIPHQIHLGELHAILRRQEDFYPFLKDNREKIEKILTFRIPYYVGPLARGNSRFAWMTRKSEETITPWNFEEVVDKGASAQSFIERMTNFDKNLPNEKVLPKHSLLYEYFTVYNELTKVKYVTEGMRKPAFLSGEQKKAIVDLLFKTNRKVTVKQLKEDYFKKIECFDSVEISGVEDRFNASLGTYHDLLKIIKDKDFLDNEENEDILEDIVLTLTLFEDREMIEERLKTYAHLFDDKVMKQLKRRRYTGWGRLSRKLINGIRDKQSGKTILDFLKSDGFANRNFMQLIHDDSLTFKEDIQKAQVSGQGDSLHEHIANLAGSPAIKKGILQTVKVVDELVKVMGRHKPENIVIEMARENQTTQKGQKNSRERMKRIEEGIKELGSQILKEHPVENTQLQNEKLYLYYLQNGRDMYVDQELDINRLSDYDVDHIVPQSFLKDDSIDNKVLTRSDKNRGKSDNVPSEEVVKKMKNYWRQLLNAKLITQRKFDNLTKAERGGLSELDKAGFIKRQLVETRQITKHVAQILDSRMNTKYDENDKLIREVKVITLKSKLVSDFRKDFQFYKVREINNYHHAHDAYLNAVVGTALIKKYPKLESEFVYGDYKVYDVRKMIAKSEQSGGSKRTADGSEFEPKKKRKV

SEQ ID NO: 218 - protein, 1625 aa, Artificial Sequence
  Synthetic
MKRTADGSEFESPKKKRKVSEVEFSHEYWMRHALTLAKRARDEREVPVGAVLVLNNRVIGEGWNRAIGLHDPTAHAEIMALRQGGLVMQNYRLIDATLYVTFEPCVMCAGAMIHSRIGRVVFGVRNSKRGAAGSLMNVLNYPGMNHRVEITEGILADECAALLCDFYRMPRQVFNAQKKAQSSINSGGSSGGSSGSETPGTSESATPESSGGSSGGSNIMNFFKTEITLANGEIRKRPLIETNGETGEIVWDKGRDFATVRKVLSMPQVNIVKKTEVQTGGFSKESILPKRNSDKLIARKKDWDPKKYGGFDSPTVAYSVLVVAKVEKGKSKKLKSVKELLGITIMERSSFEKNPIDFLEAKGYKEVKKDLIIKLPKYSLFELENGRKRMLASAGELQKGNELALPSKYVNFLYLASHYEKLKGSPEDNEQKQLFVEQHKHYLDEIIEQISEFSKRVILADANLDKVLSAYNKHRDKPIREQAENIIHLFTLTNLGAPAAFKYFDTTIDRKRYTSTKEVLDATLIHQSITGLYETRIDLSQLGGDGGSGGSGGSGGSGGSGGSGGDKKYSIGLAIGTNSVGWAVITDEYKVPSKKFKVLGNTDRHSIKKNLIGALLFDSGETAEATRLKRTARRRYTRRKNRICYLQEIFSNEMAKVDDSFFHRLEESFLVEEDKKHERHPIFGNIVDEVAYHEKYPTIYHLRKKLVDSTDKADLRLIYLALAHMIKFRGHFLIEGDLNPDNSDVDKLFIQLVQTYNQLFEENPINASGVDAKAILSARLSKSRRLENLIAQLPGEKKNGLFGNLIALSLGLTPNFKSNFDLAEDAKLQLSKDTYDDDLDNLLAQIGDQYADLFLAAKNLSDAILLSDILRVNTEITKAPLSASMIKRYDEHHQDLTLLKALVRQQLPEKYKEIFFDQSKNGYAGYIDGGASQEEFYKFIKPILEKMDGTEELLVKLNREDLLRKQRTFDNGSIPHQIHLGELHAILRRQEDFYPFLKDNREKIEKILTFRIPYYVGPLARGNSRFAWMTRKSEETITPWNFEEVVDKGASAQSFIERMTNFDKNLPNEKVLPKHSLLYEYFTVYNELTKVKYVTEGMRKPAFLSGEQKKAIVDLLFKTNRKVTVKQLKEDYFKKIECFDSVEISGVEDRFNASLGTYHDLLKIIKDKDFLDNEENEDILEDIVLTLTLFEDREMIEERLKTYAHLFDDKVMKQLKRRRYTGWGRLSRKLINGIRDKQSGKTILDFLKSDGFANRNFMQLIHDDSLTFKEDIQKAQVSGQGDSLHEHIANLAGSPAIKKGILQTVKVVDELVKVMGRHKPENIVIEMARENQTTQKGQKNSRERMKRIEEGIKELGSQILKEHPVENTQLQNEKLYLYYLQNGRDMYVDQELDINRLSDYDVDHIVPQSFLKDDSIDNKVLTRSDKNRGKSDNVPSEEVVKKMKNYWRQLLNAKLITQRKFDNLTKAERGGLSELDKAGFIKRQLVETRQITKHVAQILDSRMNTKYDENDKLIREVKVITLKSKLVSDFRKDFQFYKVREINNYHHAHDAYLNAVVGTALIKKYPKLESEFVYGDYKVYDVRKMIAKSEQEIGKATAKYFFYSSGGSKRTADGSEFEPKKKRKV

SEQ ID NO: 219 - protein, 1605 aa, Artificial Sequence; identical to SEQ ID NO: 202
  Synthetic

SEQ ID NO: 220 - protein, 1605 aa, Artificial Sequence; identical to SEQ ID NO: 202
  Synthetic

SEQ ID NO: 221 - protein, 2135 aa, Artificial Sequence
  Synthetic
MKRTADGSEFESPKKKRKVSEVEFSHEYWMRHALTLAKRAWDEREVPVGAVLVHNNRVIGEGWNRPIGRHDPTAHAEIMALRQGGLVMQNYRLIDATLYVTLEPCVMCAGAMIHSRIGRVVFGARDAKTGAAGSLMDVLHHPGMNHRVEITEGILADECAALLSDFFRMRRQEIKAQKKAQSSTDSGGSSGGSSGSETPGTSESATPESSGGSSGGSGTTGATGGAGCTCTGGGCCTTCTTCTGAGCATTGAACACCTGTCTAGGCATCCGATAGAAATCGCACAGCAGGGCGGCACATTCATCTGCCAGGATTCCCTCGGTAATTTCGACGCGGTGATTCATGCCGGGGTAGTTCAGCACGTTCATCAGGGAGCCTGCGGCGCCTCTTTTTGAGTTCCTCACGCCAAACACCACGCGGCCGATCCTAGAGTGGATCATGGCGCCGGCGCACATCACGCAAGGCTCGAATGTCACGTACAGGGTGGCGTCAATCAGTCTGTAGTTCTGCATGACCAGGCCGCCCTGTCTCAGGGCCATAATTTCGGCATGGGCTGTTGGGTCGTGCAGGCCGATGGCTCTGTTCCAGCCCTCGCCGATCACTCTATTGTTCAGCACCAGCACGGCTCCCACAGGCACCTCCCTCTCATCCCGTGCCCTCTTGGCCAGGGTCAGGGCATGTCTCATCCAGTACTCGTGGGAAAACTCCACCTCAGASGGSSGGSSGSETPGTSESATPESSGGSSGGSDKKYSIGLAIGTNSVGWAVITDEYKVPSKKFKVLGNTDRHSIKKNLIGALLFDSGETAEATRLKRTARRRYTRRKNRICYLQEIFSNEMAKVDDSFFHRLEESFLVEEDKKHERHPIFGNIVDEVAYHEKYPTIYHLRKKLVDSTDKADLRLIYLALAHMIKFRGHFLIEGDLNPDNSDVDKLFIQLVQTYNQLFEENPINASGVDAKAILSARLSKSRRLENLIAQLPGEKKNGLFGNLIALSLGLTPNFKSNFDLAEDAKLQLSKDTYDDDLDNLLAQIGDQYADLFLAAKNLSDAILLSDILRVNTEITKAPLSASMIKRYDEHHQDLTLLKALVRQQLPEKYKEIFFDQSKNGYAGYIDGGASQEEFYKFIKPILEKMDGTEELLVKLNREDLLRKQRTFDNGSIPHQIHLGELHAILRRQEDFYPFLKDNREKIEKILTFRIPYYVGPLARGNSRFAWMTRKSEETITPWNFEEVVDKGASAQSFIERMTNFDKNLPNEKVLPKHSLLYEYFTVYNELTKVKYVTEGMRKPAFLSGEQKKAIVDLLFKTNRKVTVKQLKEDYFKKIECFDSVEISGVEDRFNASLGTYHDLLKIIKDKDFLDNEENEDILEDIVLTLTLFEDREMIEERLKTYAHLFDDKVMKQLKRRRYTGWGRLSRKLINGIRDKQSGKTILDFLKSDGFANRNFMQLIHDDSLTFKEDIQKAQVSGQGDSLHEHIANLAGSPAIKKGILQTVKVVDELVKVMGRHKPENIVIEMARENQTTQKGQKNSRERMKRIEEGIKELGSQILKEHPVENTQLQNEKLYLYYLQNGRDMYVDQELDINRLSDYDVDHIVPQSFLKDDSIDNKVLTRSDKNRGKSDNVPSEEVVKKMKNYWRQLLNAKLITQRKFDNLTKAERGGLSELDKAGFIKRQLVETRQITKHVAQILDSRMNTKYDENDKLIREVKVITLKSKLVSDFRKDFQFYKVREINNYHHAHDAYLNAVVGTALIKKYPKLESEFVYGDYKVYDVRKMIAKSEQEIGKATAKYFFYSNIMNFFKTEITLANGEIRKRPLIETNGETGEIVWDKGRDFATVRKVLSMPQVNIVKKTEVQTGGFSKESILPKRNSDKLIARKKDWDPKKYGGFDSPTVAYSVLVVAKVEKGKSKKLKSVKELLGITIMERSSFEKNPIDFLEAKGYKEVKKDLIIKLPKYSLFELENGRKRMLASAGELQKGNELALPSKYVNFLYLASHYEKLKGSPEDNEQKQLFVEQHKHYLDEIIEQISEFSKRVILADANLDKVLSAYNKHRDKPIREQAENIIHLFTLTNLGAPAAFKYFDTTIDRKRYTSTKEVLDATLIHQSITGLYETRIDLSQLGGDSGGSKRTADGSEFEPKKKRKV

SEQ ID NO: 222 - DNA, 4740 bp, Artificial Sequence
  Synthetic
atgaaacggacagccgacggaagcgagttcgagtcaccaaagaagaagcggaaagtctctgaagtcgagtttagccacgagtattggatgaggcacgcactgaccctggcaaagcgagcatgggatgaaagagaagtccccgtgggcgccgtgctggtgcacaacaatagagtgatcggagagggatggaacaggccaatcggccgccacgaccctaccgcacacgcagagatcatggcactgaggcagggaggcctggtcatgcagaattaccgcctgatcgatgccaccctgtatgtgacactggagccatgcgtgatgtgcgcaggagcaatgatccacagcaggatcggaagagtggtgttcggagcacgggacgccaagaccggcgcagcaggctccctgatggatgtgctgcaccaccccggcatgaaccaccgggtggagatcacagagggaatcctggcagacgagtgcgccgccctgctgagcgatttctttagaatgcggagacaggagatcaaggcccagaagaaggcacagagctccaccgactctggaggatctagcggaggatcctctggaagcgagacaccaggcacaagcgagtccgccacaccagagagctccggcggctcctccggaggatcctctgaggtggagttttcccacgagtactggatgagacatgccctgaccctggccaagagggcacgggatgagagggaggtgcctgtgggagccgtgctggtgctgaacaatagagtgatcggcgagggctggaacagagccatcggcctgcacgacccaacagcccatgccgaaattatggccctgagacagggcggcctggtcatgcagaactacagactgattgacgccaccctgtacgtgacattcgagccttgcgtgatgtgcgccggcgccatgatccactctaggatcggccgcgtggtgtttggcgtgaggaactcaaaaagaggcgccgcaggctccctgatgaacgtgctgaactaccccggcatgaatcaccgcgtcgaaattaccgagggaatcctggcagatgaatgtgccgccctgctgtgcgatttctatcggatgcctagacaggtgttcaatgctcagaagaaggcccagagctccatcaacagtggtggaagtagcggaggctcctctggctctgagacacctggcacaagcgagagcgcaacacctgaaagcagcgggggcagcagcggggggtcagacaagaagtacagcatcggcctggccatcggcaccaactctgtgggctgggccgtgatcaccgacgagtacaaggtgcccagcaagaaattcaaggtgctgggcaacaccgaccggcacagcatcaagaagaacctgatcggagccctgctgttcgacagcggcgaaacagccgaggccacccggctgaagagaaccgccagaagaagatacaccagacggaagaaccggatctgctatctgcaagagatcttcagcaacgagatggccaaggtggacgacagcttcttccacagactggaagagtccttcctggtggaagaggataagaagcacgagcggcaccccatcttcggcaacatcgtggacgaggtggcctaccacgagaagtaccccaccatctaccacctgagaaagaaactggtggacagcaccgacaaggccgacctgcggctgatctatctggccctggcccacatgatcaagttccggggccacttcctgatcgagggcgacctgaaccccgacaacagcgacgtggacaagctgttcatccagctggtgcagacctacaaccagctgttcgaggaaaaccccatcaacgccagcggcgtggacgccaaggccatcctgtctgccagactgagcaagagcagacggctggaaaatctgatcgcccagctgcccggcgagaagaagaatggcctgttcggaaacctgattgccctgagcctgggcctgacccccaacttcaagagcaacttcgacctggccgaggatgccaaactgcagctgagcaaggacacctacgacgacgacctggacaacctgctggcccagatcggcgaccagtacgccgacctgtttctggccgccaagaacctgtccgacgccatcctgctgagcgacatcctgagagtgaacaccgagatcaccaaggcccccctgagcgcctctatgatcaagagatacgacgagcaccaccaggacctgaccctgctgaaagctctcgtgcggcagcagctgcctgagaagtacaaagagattttcttcgaccagagcaagaacggctacgccggctacattgacggcggagccagccaggaagagttctacaagttcatcaagcccatcctggaaaagatggacggcaccgaggaactgctcgtgaagctgaacagagaggacctgctgcggaagcagcggaccttcgacaacggcagcatcccccaccagatccacctgggagagctgcacgccattctgcggcggcaggaagatttttacccattcctgaaggacaaccgggaaaagatcgagaagatcctgaccttccgcatcccctactacgtgggccctctggccaggggaaacagcagattcgcctggatgaccagaaagagcgaggaaaccatcaccccctggaacttcgaggaagtggtggacaagggcgcttccgcccagagcttcatcgagcggatgaccaacttcgataagaacctgcccaacgagaaggtgctgcccaagcacagcctgctgtacgagtacttcaccgtgtataacgagctgaccaaagtgaaatacgtgaccgagggaatgagaaagcccgccttcctgagcggcgagcagaaaaaggccatcgtggacctgctgttcaagaccaaccggaaagtgaccgtgaagcagctgaaagaggactacttcaagaaaatcgaggacaagaagtacagcatcggcctggccatcggcaccaactctgtgggctgggccgtgatcaccgacgagtacaaggtgcccagcaagaaattcaaggtgctgggcaacaccgaccggcacagcatcaagaagaacctgatcggagccctgctgttcgacagcggcgaaacagccgaggccacccggctgaagagaaccgccagaagaagatacaccagacggaagaaccggatctgctatctgcaagagatcttcagcaacgagatggccaaggtggacgacagcttcttccacagactggaagagtccttcctggtggaagaggataagaagcacgagcggcaccccatcttcggcaacatcgtggacgaggtggcctaccacgagaagtaccccaccatctaccacctgagaaagaaactggtggacagcaccgacaaggccgacctgcggctgatctatctggccctggcccacatgatcaagttccggggccacttcctgatcgagggcgacctgaaccccgacaacagcgacgtggacaagctgttcatccagctggtgcagacctacaaccagctgttcgaggaaaaccccatcaacgccagcggcgtggacgccaaggccatcctgtctgccagactgagcaagagcagacggctggaaaatctgatcgcccagctgcccggcgagaagaagaatggcctgttcggaaacctgattgccctgagcctgggcctgacccccaacttcaagagcaacttcgacctggccgaggatgccaaactgcagctgagcaaggacacctacgacgacgacctggacaacctgctggcccagatcggcgaccagtacgccgacctgtttctggccgccaagaacctgtccgacgccatcctgctgagcgacatcctgagagtgaacaccgagatcaccaaggcccccctgagcgcctctatgatcaagagatacgacgagcaccaccaggacctgaccctgctgaaagctctcgtgcggcagcagctgcctgagaagtacaaagagattttcttcgaccagagcaagaacggctacgccggctacattgacggcggagccagccaggaagagttctacaagttcatcaagcccatcctggaaaagatggacggcaccgaggaactgctcgtgaagctgaacagagaggacctgctgcggaagcagcggaccttcgacaacggcagcatcccccaccagatccacctgggagagctgcacgccattctgcggcggcaggaagatttttacccattcctgaaggacaaccgggaaaagatcgagaagatcctgaccttccgcatcccctactacgtgggccctctggccaggggaaacagcagattcgcctggatgaccagaaagagcgaggaaaccatcaccccctggaacttcgaggaagtggtggacaagggcgcttccgcccagagcttcatcgagcggatgaccaacttcgataagaacctgcccaacgagaaggtgctgcccaagcacagcctgctgtacgagtacttcaccgtgtataacgagctgaccaaagtgaaatacgtgaccgagggaatgagaaagcccgccttcctgagcggcgagcagaaaaaggccatcgtggacctgctgttcaagaccaaccggaaagtgaccgtgaagcagctgaaagaggactacttcaagaaaatcgagtctggcggctcaaaaagaaccgccgacggcagcgaattcgagcccaagaagaagaggaaagtc

SEQ ID NO: 223 - protein, 1853 aa, Artificial Sequence
  Synthetic
MKRTADGSEFESPKKKRKVSSETGPVAVDPTLRRRIEPHEFEVFFDPRELRKETCLLYEINWGGRHSIWRHTSQNTNKHVEVNFIEKFTTERYFCPNTRCSITWFLSWSPCGECSRAITEFLSRYPHVTLFIYIARLYHHADPRNRQGLRDLISSGVTIQIMTEQESGYCWRNFVNYSPSNEAHWPRYPHLWVRLYVLELYCIILGLPPCLNILRRKQPQLTFFTIALQSCHYQRLPPHILWATGLKSGGSSGGSSGSETPGTSESATPESSGGSSGGSDKKYSIGLAIGTNSVGWAVITDEYKVPSKKFKVLGNTDRHSIKKNLIGALLFDSGETAEATRLKRTARRRYTRRKNRICYLQEIFSNEMAKVDDSFFHRLEESFLVEEDKKHERHPIFGNIVDEVAYHEKYPTIYHLRKKLVDSTDKADLRLIYLALAHMIKFRGHFLIEGDLNPDNSDVDKLFIQLVQTYNQLFEENPINASGVDAKAILSARLSKSRRLENLIAQLPGEKKNGLFGNLIALSLGLTPNFKSNFDLAEDAKLQLSKDTYDDDLDNLLAQIGDQYADLFLAAKNLSDAILLSDILRVNTEITKAPLSASMIKRYDEHHQDLTLLKALVRQQLPEKYKEIFFDQSKNGYAGYIDGGASQEEFYKFIKPILEKMDGTEELLVKLNREDLLRKQRTFDNGSIPHQIHLGELHAILRRQEDFYPFLKDNREKIEKILTFRIPYYVGPLARGNSRFAWMTRKSEETITPWNFEEVVDKGASAQSFIERMTNFDKNLPNEKVLPKHSLLYEYFTVYNELTKVKYVTEGMRKPAFLSGEQKKAIVDLLFKTNRKVTVKQLKEDYFKKIECFDSVEISGVEDRFNASLGTYHDLLKIIKDKDFLDNEENEDILEDIVLTLTLFEDREMIEERLKTYAHLFDDKVMKQLKRRRYTGWGRLSRKLINGIRDKQSGKTILDFLKSDGFANRNFMQLIHDDSLTFKEDIQKAQVSGQGDSLHEHIANLAGSPAIKKGILQTVKVVDELVKVMGRHKPENIVIEMARENQTTQKGQKNSRERMKRIEEGIKELGSQILKEHPVENTQLQNEKLYLYYLQNGRDMYVDQELDINRLSDYDVDHIVPQSFLKDDSIDNKVLTRSDKNRGKSDNVPSEEVVKKMKNYWRQLLNAKLITQRKFDNLTKAERGGLSELDKAGFIKRQLVETRQITKHVAQILDSRMNTKYDENDKLIREVKVITLKSKLVSDFRKDFQFYKVREINNYHHAHDAYLNAVVGTALIKKYPKLESEFVYGDYKVYDVRKMIAKSEQEIGKATAKYFFYSNIMNFFKTEITLANGEIRKRPLIETNGETGEIVWDKGRDFATVRKVLSMPQVNIVKKTEVQTGGFSKESILPKRNSDKLIARKKDWDPKKYGGFDSPTVAYSVLVVAKVEKGKSKKLKSVKELLGITIMERSSFEKNPIDFLEAKGYKEVKKDLIIKLPKYSLFELENGRKRMLASAGELQKGNELALPSKYVNFLYLASHYEKLKGSPEDNEQKQLFVEQHKHYLDEIIEQISEFSKRVILADANLDKVLSAYNKHRDKPIREQAENIIHLFTLTNLGAPAAFKYFDTTIDRKRYTSTKEVLDATLIHQSITGLYETRIDLSQLGGDSGGSGGSGGSTNLSDIIEKETGKQLVIQESILMLPEEVEEVIGNKPESDILVHTAYDESTDENVMLLTSDAPEYKPWALVIQDSNGENKIKMLSGGSGGSGGSTNLSDIIEKETGKQLVIQESILMLPEEVEEVIGNKPESDILVHTAYDESTDENVMLLTSDAPEYKPWALVIQDSNGENKIKMLSGGSKRTADGSEFEPKKKRKV

SEQ ID NO: 224 - protein, 1853 aa, Artificial Sequence
  Synthetic
MKRTADGSEFESPKKKRKVSSETGPVAVDPTLRRRIEPHEFEVFFDPRELRKETCLLYEINWGGRHSIWRHTSQNTNKHVEVNFIEKFTTERYFCPNTRCSITWFLSYSPCGECSRAITEFLSRYPHVTLFIYIARLYHHADPENRQGLRDLISSGVTIQIMTEQESGYCWRNFVNYSPSNEAHWPRYPHLWVRLYVLELYCIILGLPPCLNILRRKQPQLTFFTIALQSCHYQRLPPHILWATGLKSGGSSGGSSGSETPGTSESATPESSGGSSGGSDKKYSIGLAIGTNSVGWAVITDEYKVPSKKFKVLGNTDRHSIKKNLIGALLFDSGETAEATRLKRTARRRYTRRKNRICYLQEIFSNEMAKVDDSFFHRLEESFLVEEDKKHERHPIFGNIVDEVAYHEKYPTIYHLRKKLVDSTDKADLRLIYLALAHMIKFRGHFLIEGDLNPDNSDVDKLFIQLVQTYNQLFEENPINASGVDAKAILSARLSKSRRLENLIAQLPGEKKNGLFGNLIALSLGLTPNFKSNFDLAEDAKLQLSKDTYDDDLDNLLAQIGDQYADLFLAAKNLSDAILLSDILRVNTEITKAPLSASMIKRYDEHHQDLTLLKALVRQQLPEKYKEIFFDQSKNGYAGYIDGGASQEEFYKFIKPILEKMDGTEELLVKLNREDLLRKQRTFDNGSIPHQIHLGELHAILRRQEDFYPFLKDNREKIEKILTFRIPYYVGPLARGNSRFAWMTRKSEETITPWNFEEVVDKGASAQSFIERMTNFDKNLPNEKVLPKHSLLYEYFTVYNELTKVKYVTEGMRKPAFLSGEQKKAIVDLLFKTNRKVTVKQLKEDYFKKIECFDSVEISGVEDRFNASLGTYHDLLKIIKDKDFLDNEENEDILEDIVLTLTLFEDREMIEERLKTYAHLFDDKVMKQLKRRRYTGWGRLSRKLINGIRDKQSGKTILDFLKSDGFANRNFMQLIHDDSLTFKEDIQKAQVSGQGDSLHEHIANLAGSPAIKKGILQTVKVVDELVKVMGRHKPENIVIEMARENQTTQKGQKNSRERMKRIEEGIKELGSQILKEHPVENTQLQNEKLYLYYLQNGRDMYVDQELDINRLSDYDVDHIVPQSFLKDDSIDNKVLTRSDKNRGKSDNVPSEEVVKKMKNYWRQLLNAKLITQRKFDNLTKAERGGLSELDKAGFIKRQLVETRQITKHVAQILDSRMNTKYDENDKLIREVKVITLKSKLVSDFRKDFQFYKVREINNYHHAHDAYLNAVVGTALIKKYPKLESEFVYGDYKVYDVRKMIAKSEQEIGKATAKYFFYSNIMNFFKTEITLANGEIRKRPLIETNGETGEIVWDKGRDFATVRKVLSMPQVNIVKKTEVQTGGFSKESILPKRNSDKLIARKKDWDPKKYGGFDSPTVAYSVLVVAKVEKGKSKKLKSVKELLGITIMERSSFEKNPIDFLEAKGYKEVKKDLIIKLPKYSLFELENGRKRMLASAGELQKGNELALPSKYVNFLYLASHYEKLKGSPEDNEQKQLFVEQHKHYLDEIIEQISEFSKRVILADANLDKVLSAYNKHRDKPIREQAENIIHLFTLTNLGAPAAFKYFDTTIDRKRYTSTKEVLDATLIHQSITGLYETRIDLSQLGGDSGGSGGSGGSTNLSDIIEKETGKQLVIQESILMLPEEVEEVIGNKPESDILVHTAYDESTDENVMLLTSDAPEYKPWALVIQDSNGENKIKMLSGGSGGSGGSTNLSDIIEKETGKQLVIQESILMLPEEVEEVIGNKPESDILVHTAYDESTDENVMLLTSDAPEYKPWALVIQDSNGENKIKMLSGGSKRTADGSEFEPKKKRKV

SEQ ID NO: 225 - protein, 1853 aa, Artificial Sequence
  Synthetic
MKRTADGSEFESPKKKRKVSSETGPVAVDPTLRRRIEPHEFEVFFDPRELRKETCLLYEINWGGRHSIWRHTSQNTNKHVEVNFIEKFTTERYFCPNTRCSITWFLSYSPCGECSRAITEFLSRYPHVTLFIYIARLYHHADPRNRQGLEDLISSGVTIQIMTEQESGYCWRNFVNYSPSNEAHWPRYPHLWVRLYVLELYCIILGLPPCLNILRRKQPQLTFFTIALQSCHYQRLPPHILWATGLKSGGSSGGSSGSETPGTSESATPESSGGSSGGSDKKYSIGLAIGTNSVGWAVITDEYKVPSKKFKVLGNTDRHSIKKNLIGALLFDSGETAEATRLKRTARRRYTRRKNRICYLQEIFSNEMAKVDDSFFHRLEESFLVEEDKKHERHPIFGNIVDEVAYHEKYPTIYHLRKKLVDSTDKADLRLIYLALAHMIKFRGHFLIEGDLNPDNSDVDKLFIQLVQTYNQLFEENPINASGVDAKAILSARLSKSRRLENLIAQLPGEKKNGLFGNLIALSLGLTPNFKSNFDLAEDAKLQLSKDTYDDDLDNLLAQIGDQYADLFLAAKNLSDAILLSDILRVNTEITKAPLSASMIKRYDEHHQDLTLLKALVRQQLPEKYKEIFFDQSKNGYAGYIDGGASQEEFYKFIKPILEKMDGTEELLVKLNREDLLRKQRTFDNGSIPHQIHLGELHAILRRQEDFYPFLKDNREKIEKILTFRIPYYVGPLARGNSRFAWMTRKSEETITPWNFEEVVDKGASAQSFIERMTNFDKNLPNEKVLPKHSLLYEYFTVYNELTKVKYVTEGMRKPAFLSGEQKKAIVDLLFKTNRKVTVKQLKEDYFKKIECFDSVEISGVEDRFNASLGTYHDLLKIIKDKDFLDNEENEDILEDIVLTLTLFEDREMIEERLKTYAHLFDDKVMKQLKRRRYTGWGRLSRKLINGIRDKQSGKTILDFLKSDGFANRNFMQLIHDDSLTFKEDIQKAQVSGQGDSLHEHIANLAGSPAIKKGILQTVKVVDELVKVMGRHKPENIVIEMARENQTTQKGQKNSRERMKRIEEGIKELGSQILKEHPVENTQLQNEKLYLYYLQNGRDMYVDQELDINRLSDYDVDHIVPQSFLKDDSIDNKVLTRSDKNRGKSDNVPSEEVVKKMKNYWRQLLNAKLITQRKFDNLTKAERGGLSELDKAGFIKRQLVETRQITKHVAQILDSRMNTKYDENDKLIREVKVITLKSKLVSDFRKDFQFYKVREINNYHHAHDAYLNAVVGTALIKKYPKLESEFVYGDYKVYDVRKMIAKSEQEIGKATAKYFFYSNIMNFFKTEITLANGEIRKRPLIETNGETGEIVWDKGRDFATVRKVLSMPQVNIVKKTEVQTGGFSKESILPKRNSDKLIARKKDWDPKKYGGFDSPTVAYSVLVVAKVEKGKSKKLKSVKELLGITIMERSSFEKNPIDFLEAKGYKEVKKDLIIKLPKYSLFELENGRKRMLASAGELQKGNELALPSKYVNFLYLASHYEKLKGSPEDNEQKQLFVEQHKHYLDEIIEQISEFSKRVILADANLDKVLSAYNKHRDKPIREQAENIIHLFTLTNLGAPAAFKYFDTTIDRKRYTSTKEVLDATLIHQSITGLYETRIDLSQLGGDSGGSGGSGGSTNLSDIIEKETGKQLVIQESILMLPEEVEEVIGNKPESDILVHTAYDESTDENVMLLTSDAPEYKPWALVIQDSNGENKIKMLSGGSGGSGGSTNLSDIIEKETGKQLVIQESILMLPEEVEEVIGNKPESDILVHTAYDESTDENVMLLTSDAPEYKPWALVIQDSNGENKIKMLSGGSKRTADGSEFEPKKKRKV

SEQ ID NO: 226 - protein, 1853 aa, Artificial Sequence
  Synthetic
MKRTADGSEFESPKKKRKVSSETGPVAVDPTLRRRIEPHEFEVFFDPRELRKETCLLYEINWGGRHSIWRHTSQNTNKHVEVNFIEKFTTERYFCPNTRCSITWFLSYSPCGECSRAITEFLSRYPHVTLFIYIARLYHHADPENRQGLEDLISSGVTIQIMTEQESGYCWRNFVNYSPSNEAHWPRYPHLWVRLYVLELYCIILGLPPCLNILRRKQPQLTFFTIALQSCHYQRLPPHILWATGLKSGGSSGGSSGSETPGTSESATPESSGGSSGGSDKKYSIGLAIGTNSVGWAVITDEYKVPSKKFKVLGNTDRHSIKKNLIGALLFDSGETAEATRLKRTARRRYTRRKNRICYLQEIFSNEMAKVDDSFFHRLEESFLVEEDKKHERHPIFGNIVDEVAYHEKYPTIYHLRKKLVDSTDKADLRLIYLALAHMIKFRGHFLIEGDLNPDNSDVDKLFIQLVQTYNQLFEENPINASGVDAKAILSARLSKSRRLENLIAQLPGEKKNGLFGNLIALSLGLTPNFKSNFDLAEDAKLQLSKDTYDDDLDNLLAQIGDQYADLFLAAKNLSDAILLSDILRVNTEITKAPLSASMIKRYDEHHQDLTLLKALVRQQLPEKYKEIFFDQSKNGYAGYIDGGASQEEFYKFIKPILEKMDGTEELLVKLNREDLLRKQRTFDNGSIPHQIHLGELHAILRRQEDFYPFLKDNREKIEKILTFRIPYYVGPLARGNSRFAWMTRKSEETITPWNFEEVVDKGASAQSFIERMTNFDKNLPNEKVLPKHSLLYEYFTVYNELTKVKYVTEGMRKPAFLSGEQKKAIVDLLFKTNRKVTVKQLKEDYFKKIECFDSVEISGVEDRFNASLGTYHDLLKIIKDKDFLDNEENEDILEDIVLTLTLFEDREMIEERLKTYAHLFDDKVMKQLKRRRYTGWGRLSRKLINGIRDKQSGKTILDFLKSDGFANRNFMQLIHDDSLTFKEDIQKAQVSGQGDSLHEHIANLAGSPAIKKGILQTVKVVDELVKVMGRHKPENIVIEMARENQTTQKGQKNSRERMKRIEEGIKELGSQILKEHPVENTQLQNEKLYLYYLQNGRDMYVDQELDINRLSDYDVDHIVPQSFLKDDSIDNKVLTRSDKNRGKSDNVPSEEVVKKMKNYWRQLLNAKLITQRKFDNLTKAERGGLSELDKAGFIKRQLVETRQITKHVAQILDSRMNTKYDENDKLIREVKVITLKSKLVSDFRKDFQFYKVREINNYHHAHDAYLNAVVGTALIKKYPKLESEFVYGDYKVYDVRKMIAKSEQEIGKATAKYFFYSNIMNFFKTEITLANGEIRKRPLIETNGETGEIVWDKGRDFATVRKVLSMPQVNIVKKTEVQTGGFSKESILPKRNSDKLIARKKDWDPKKYGGFDSPTVAYSVLVVAKVEKGKSKKLKSVKELLGITIMERSSFEKNPIDFLEAKGYKEVKKDLIIKLPKYSLFELENGRKRMLASAGELQKGNELALPSKYVNFLYLASHYEKLKGSPEDNEQKQLFVEQHKHYLDEIIEQISEFSKRVILADANLDKVLSAYNKHRDKPIREQAENIIHLFTLTNLGAPAAFKYFDTTIDRKRYTSTKEVLDATLIHQSITGLYETRIDLSQLGGDSGGSGGSGGSTNLSDIIEKETGKQLVIQESILMLPEEVEEVIGNKPESDILVHTAYDESTDENVMLLTSDAPEYKPWALVIQDSNGENKIKMLSGGSGGSGGSTNLSDIIEKETGKQLVIQESILMLPEEVEEVIGNKPESDILVHTAYDESTDENVMLLTSDAPEYKPWALVIQDSNGENKIKMLSGGSKRTADGSEFEPKKKRKV

SEQ ID NO: 227 - protein, 1853 aa, Artificial Sequence
  Synthetic
MKRTADGSEFESPKKKRKVSSETGPVAVDPTLRRRIEPHEFEVFFDPRELRKETCLLYEINWGGRHSIWRHTSQNTNKHVEVNFIEKFTTERYFCPNTRCSITWFLSWSPCGECSRAITEFLSRYPHVTLFIYIARLYHHADPENRQGLEDLISSGVTIQIMTEQESGYCWRNFVNYSPSNEAHWPRYPHLWVRLYVLELYCIILGLPPCLNILRRKQPQLTFFTIALQSCHYQRLPPHILWATGLKSGGSSGGSSGSETPGTSESATPESSGGSSGGSDKKYSIGLAIGTNSVGWAVITDEYKVPSKKFKVLGNTDRHSIKKNLIGALLFDSGETAEATRLKRTARRRYTRRKNRICYLQEIFSNEMAKVDDSFFHRLEESFLVEEDKKHERHPIFGNIVDEVAYHEKYPTIYHLRKKLVDSTDKADLRLIYLALAHMIKFRGHFLIEGDLNPDNSDVDKLFIQLVQTYNQLFEENPINASGVDAKAILSARLSKSRRLENLIAQLPGEKKNGLFGNLIALSLGLTPNFKSNFDLAEDAKLQLSKDTYDDDLDNLLAQIGDQYADLFLAAKNLSDAILLSDILRVNTEITKAPLSASMIKRYDEHHQDLTLLKALVRQQLPEKYKEIFFDQSKNGYAGYIDGGASQEEFYKFIKPILEKMDGTEELLVKLNREDLLRKQRTFDNGSIPHQIHLGELHAILRRQEDFYPFLKDNREKIEKILTFRIPYYVGPLARGNSRFAWMTRKSEETITPWNFEEVVDKGASAQSFIERMTNFDKNLPNEKVLPKHSLLYEYFTVYNELTKVKYVTEGMRKPAFLSGEQKKAIVDLLFKTNRKVTVKQLKEDYFKKIECFDSVEISGVEDRFNASLGTYHDLLKIIKDKDFLDNEENEDILEDIVLTLTLFEDREMIEERLKTYAHLFDDKVMKQLKRRRYTGWGRLSRKLINGIRDKQSGKTILDFLKSDGFANRNFMQLIHDDSLTFKEDIQKAQVSGQGDSLHEHIANLAGSPAIKKGILQTVKVVDELVKVMGRHKPENIVIEMARENQTTQKGQKNSRERMKRIEEGIKELGSQILKEHPVENTQLQNEKLYLYYLQNGRDMYVDQELDINRLSDYDVDHIVPQSFLKDDSIDNKVLTRSDKNRGKSDNVPSEEVVKKMKNYWRQLLNAKLITQRKFDNLTKAERGGLSELDKAGFIKRQLVETRQITKHVAQILDSRMNTKYDENDKLIREVKVITLKSKLVSDFRKDFQFYKVREINNYHHAHDAYLNAVVGTALIKKYPKLESEFVYGDYKVYDVRKMIAKSEQEIGKATAKYFFYSNIMNFFKTEITLANGEIRKRPLIETNGETGEIVWDKGRDFATVRKVLSMPQVNIVKKTEVQTGGFSKESILPKRNSDKLIARKKDWDPKKYGGFDSPTVAYSVLVVAKVEKGKSKKLKSVKELLGITIMERSSFEKNPIDFLEAKGYKEVKKDLIIKLPKYSLFELENGRKRMLASAGELQKGNELALPSKYVNFLYLASHYEKLKGSPEDNEQKQLFVEQHKHYLDEIIEQISEFSKRVILADANLDKVLSAYNKHRDKPIREQAENIIHLFTLTNLGAPAAFKYFDTTIDRKRYTSTKEVLDATLIHQSITGLYETRIDLSQLGGDSGGSGGSGGSTNLSDIIEKETGKQLVIQESILMLPEEVEEVIGNKPESDILVHTAYDESTDENVMLLTSDAPEYKPWALVIQDSNGENKIKMLSGGSGGSGGSTNLSDIIEKETGKQLVIQESILMLPEEVEEVIGNKPESDILVHTAYDESTDENVMLLTSDAPEYKPWALVIQDSNGENKIKMLSGGSKRTADGSEFEPKKKRKV

SEQ ID NO: 228 - protein, 1853 aa, Artificial Sequence
  Synthetic
MKRTADGSEFESPKKKRKVSSETGPVAVDPTLRRRIEPHEFEVFFDPRELAKETCLLYEINWGGRHSIWRHTSQNTNKHVEVNFIEKFTTERYFCPNTRCSITWFLSWSPCGECSRAITEFLSRYPHVTLFIYIARLYHHADPRNRQGLRDLISSGVTIQIMTEQESGYCWRNFVNYSPSNEAHWPRYPHLWVRLYVLELYCIILGLPPCLNILRRKQPQLTFFTIALQSCHYQRLPPHILWATGLKSGGSSGGSSGSETPGTSESATPESSGGSSGGSDKKYSIGLAIGTNSVGWAVITDEYKVPSKKFKVLGNTDRHSIKKNLIGALLFDSGETAEATRLKRTARRRYTRRKNRICYLQEIFSNEMAKVDDSFFHRLEESFLVEEDKKHERHPIFGNIVDEVAYHEKYPTIYHLRKKLVDSTDKADLRLIYLALAHMIKFRGHFLIEGDLNPDNSDVDKLFIQLVQTYNQLFEENPINASGVDAKAILSARLSKSRRLENLIAQLPGEKKNGLFGNLIALSLGLTPNFKSNFDLAEDAKLQLSKDTYDDDLDNLLAQIGDQYADLFLAAKNLSDAILLSDILRVNTEITKAPLSASMIKRYDEHHQDLTLLKALVRQQLPEKYKEIFFDQSKNGYAGYIDGGASQEEFYKFIKPILEKMDGTEELLVKLNREDLLRKQRTFDNGSIPHQIHLGELHAILRRQEDFYPFLKDNREKIEKILTFRIPYYVGPLARGNSRFAWMTRKSEETITPWNFEEVVDKGASAQSFIERMTNFDKNLPNEKVLPKHSLLYEYFTVYNELTKVKYVTEGMRKPAFLSGEQKKAIVDLLFKTNRKVTVKQLKEDYFKKIECFDSVEISGVEDRFNASLGTYHDLLKIIKDKDFLDNEENEDILEDIVLTLTLFEDREMIEERLKTYAHLFDDKVMKQLKRRRYTGWGRLSRKLINGIRDKQSGKTILDFLKSDGFANRNFMQLIHDDSLTFKEDIQKAQVSGQGDSLHEHIANLAGSPAIKKGILQTVKVVDELVKVMGRHKPENIVIEMARENQTTQKGQKNSRERMKRIEEGIKELGSQILKEHPVENTQLQNEKLYLYYLQNGRDMYVDQELDINRLSDYDVDHIVPQSFLKDDSIDNKVLTRSDKNRGKSDNVPSEEVVKKMKNYWRQLLNAKLITQRKFDNLTKAERGGLSELDKAGFIKRQLVETRQITKHVAQILDSRMNTKYDENDKLIREVKVITLKSKLVSDFRKDFQFYKVREINNYHHAHDAYLNAVVGTALIKKYPKLESEFVYGDYKVYDVRKMIAKSEQEIGKATAKYFFYSNIMNFFKTEITLANGEIRKRPLIETNGETGEIVWDKGRDFATVRKVLSMPQVNIVKKTEVQTGGFSKESILPKRNSDKLIARKKDWDPKKYGGFDSPTVAYSVLVVAKVEKGKSKKLKSVKELLGITIMERSSFEKNPIDFLEAKGYKEVKKDLIIKLPKYSLFELENGRKRMLASAGELQKGNELALPSKYVNFLYLASHYEKLKGSPEDNEQKQLFVEQHKHYLDEIIEQISEFSKRVILADANLDKVLSAYNKHRDKPIREQAENIIHLFTLTNLGAPAAFKYFDTTIDRKRYTSTKEVLDATLIHQSITGLYETRIDLSQLGGDSGGSGGSGGSTNLSDIIEKETGKQLVIQESILMLPEEVEEVIGNKPESDILVHTAYDESTDENVMLLTSDAPEYKPWALVIQDSNGENKIKMLSGGSGGSGGSTNLSDIIEKETGKQLVIQESILMLPEEVEEVIGNKPESDILVHTAYDESTDENVMLLTSDAPEYKPWALVIQDSNGENKIKMLSGGSKRTADGSEFEPKKKRKV

SEQ ID NO: 229 - protein, 1853 aa, Artificial Sequence
  Synthetic
MKRTADGSEFESPKKKRKVSSETGPVAVDPTLRRRIEPHEFEVFFDPRELAAETCLLYEINWGGRHSIWRHTSQNTNKHVEVNFIEKFTTERYFCPNTRCSITWFLSWSPCGECSRAITEFLSRYPHVTLFIYIARLYHHADPRNRQGLRDLISSGVTIQIMTEQESGYCWRNFVNYSPSNEAHWPRYPHLWVRLYVLELYCIILGLPPCLNILRRKQPQLTFFTIALQSCHYQRLPPHILWATGLKSGGSSGGSSGSETPGTSESATPESSGGSSGGSDKKYSIGLAIGTNSVGWAVITDEYKVPSKKFKVLGNTDRHSIKKNLIGALLFDSGETAEATRLKRTARRRYTRRKNRICYLQEIFSNEMAKVDDSFFHRLEESFLVEEDKKHERHPIFGNIVDEVAYHEKYPTIYHLRKKLVDSTDKADLRLIYLALAHMIKFRGHFLIEGDLNPDNSDVDKLFIQLVQTYNQLFEENPINASGVDAKAILSARLSKSRRLENLIAQLPGEKKNGLFGNLIALSLGLTPNFKSNFDLAEDAKLQLSKDTYDDDLDNLLAQIGDQYADLFLAAKNLSDAILLSDILRVNTEITKAPLSASMIKRYDEHHQDLTLLKALVRQQLPEKYKEIFFDQSKNGYAGYIDGGASQEEFYKFIKPILEKMDGTEELLVKLNREDLLRKQRTFDNGSIPHQIHLGELHAILRRQEDFYPFLKDNREKIEKILTFRIPYYVGPLARGNSRFAWMTRKSEETITPWNFEEVVDKGASAQSFIERMTNFDKNLPNEKVLPKHSLLYEYFTVYNELTKVKYVTEGMRKPAFLSGEQKKAIVDLLFKTNRKVTVKQLKEDYFKKIECFDSVEISGVEDRFNASLGTYHDLLKIIKDKDFLDNEENEDILEDIVLTLTLFEDREMIEERLKTYAHLFDDKVMKQLKRRRYTGWGRLSRKLINGIRDKQSGKTILDFLKSDGFANRNFMQLIHDDSLTFKEDIQKAQVSGQGDSLHEHIANLAGSPAIKKGILQTVKVVDELVKVMGRHKPENIVIEMARENQTTQKGQKNSRERMKRIEEGIKELGSQILKEHPVENTQLQNEKLYLYYLQNGRDMYVDQELDINRLSDYDVDHIVPQSFLKDDSIDNKVLTRSDKNRGKSDNVPSEEVVKKMKNYWRQLLNAKLITQRKFDNLTKAERGGLSELDKAGFIKRQLVETRQITKHVAQILDSRMNTKYDENDKLIREVKVITLKSKLVSDFRKDFQFYKVREINNYHHAHDAYLNAVVGTALIKKYPKLESEFVYGDYKVYDVRKMIAKSEQEIGKATAKYFFYSNIMNFFKTEITLANGEIRKRPLIETNGETGEIVWDKGRDFATVRKVLSMPQVNIVKKTEVQTGGFSKESILPKRNSDKLIARKKDWDPKKYGGFDSPTVAYSVLVVAKVEKGKSKKLKSVKELLGITIMERSSFEKNPIDFLEAKGYKEVKKDLIIKLPKYSLFELENGRKRMLASAGELQKGNELALPSKYVNFLYLASHYEKLKGSPEDNEQKQLFVEQHKHYLDEIIEQISEFSKRVILADANLDKVLSAYNKHRDKPIREQAENIIHLFTLTNLGAPAAFKYFDTTIDRKRYTSTKEVLDATLIHQSITGLYETRIDLSQLGGDSGGSGGSGGSTNLSDIIEKETGKQLVIQESILMLPEEVEEVIGNKPESDILVHTAYDESTDENVMLLTSDAPEYKPWALVIQDSNGENKIKMLSGGSGGSGGSTNLSDIIEKETGKQLVIQESILMLPEEVEEVIGNKPESDILVHTAYDESTDENVMLLTSDAPEYKPWALVIQDSNGENKIKMLSGGSKRTADGSEFEPKKKRKV

SEQ ID NO: 230 - protein, 1824 aa, Artificial Sequence
  Synthetic
MKRTADGSEFESPKKKRKVSEASPASGPRHLMDPHIFTSNFNNGIGRHKTYLCYEVERLDNGTSVKMDQHRGFLHNQAKNLLCGFYGRHAELRFLDLVPSLQLDPAQIYRVTWFISWSPCFSWGCAGEVRAFLQENTHVRLRIFAARIYDYDPLYKEALQMLRDAGAQVSIMTYDEFKHCWDTFVDHQGCPFQPWDGLDEHSQALSGRLRAILQNQGNSGGSSGGSSGSETPGTSESATPESSGGSSGGSDKKYSIGLAIGTNSVGWAVITDEYKVPSKKFKVLGNTDRHSIKKNLIGALLFDSGETAEATRLKRTARRRYTRRKNRICYLQEIFSNEMAKVDDSFFHRLEESFLVEEDKKHERHPIFGNIVDEVAYHEKYPTIYHLRKKLVDSTDKADLRLIYLALAHMIKFRGHFLIEGDLNPDNSDVDKLFIQLVQTYNQLFEENPINASGVDAKAILSARLSKSRRLENLIAQLPGEKKNGLFGNLIALSLGLTPNFKSNFDLAEDAKLQLSKDTYDDDLDNLLAQIGDQYADLFLAAKNLSDAILLSDILRVNTEITKAPLSASMIKRYDEHHQDLTLLKALVRQQLPEKYKEIFFDQSKNGYAGYIDGGASQEEFYKFIKPILEKMDGTEELLVKLNREDLLRKQRTFDNGSIPHQIHLGELHAILRRQEDFYPFLKDNREKIEKILTFRIPYYVGPLARGNSRFAWMTRKSEETITPWNFEEVVDKGASAQSFIERMTNFDKNLPNEKVLPKHSLLYEYFTVYNELTKVKYVTEGMRKPAFLSGEQKKAIVDLLFKTNRKVTVKQLKEDYFKKIECFDSVEISGVEDRFNASLGTYHDLLKIIKDKDFLDNEENEDILEDIVLTLTLFEDREMIEERLKTYAHLFDDKVMKQLKRRRYTGWGRLSRKLINGIRDKQSGKTILDFLKSDGFANRNFMQLIHDDSLTFKEDIQKAQVSGQGDSLHEHIANLAGSPAIKKGILQTVKVVDELVKVMGRHKPENIVIEMARENQTTQKGQKNSRERMKRIEEGIKELGSQILKEHPVENTQLQNEKLYLYYLQNGRDMYVDQELDINRLSDYDVDHIVPQSFLKDDSIDNKVLTRSDKNRGKSDNVPSEEVVKKMKNYWRQLLNAKLITQRKFDNLTKAERGGLSELDKAGFIKRQLVETRQITKHVAQILDSRMNTKYDENDKLIREVKVITLKSKLVSDFRKDFQFYKVREINNYHHAHDAYLNAVVGTALIKKYPKLESEFVYGDYKVYDVRKMIAKSEQEIGKATAKYFFYSNIMNFFKTEITLANGEIRKRPLIETNGETGEIVWDKGRDFATVRKVLSMPQVNIVKKTEVQTGGFSKESILPKRNSDKLIARKKDWDPKKYGGFDSPTVAYSVLVVAKVEKGKSKKLKSVKELLGITIMERSSFEKNPIDFLEAKGYKEVKKDLIIKLPKYSLFELENGRKRMLASAGELQKGNELALPSKYVNFLYLASHYEKLKGSPEDNEQKQLFVEQHKHYLDEIIEQISEFSKRVILADANLDKVLSAYNKHRDKPIREQAENIIHLFTLTNLGAPAAFKYFDTTIDRKRYTSTKEVLDATLIHQSITGLYETRIDLSQLGGDSGGSGGSGGSTNLSDIIEKETGKQLVIQESILMLPEEVEEVIGNKPESDILVHTAYDESTDENVMLLTSDAPEYKPWALVIQDSNGENKIKMLSGGSGGSGGSTNLSDIIEKETGKQLVIQESILMLPEEVEEVIGNKPESDILVHTAYDESTDENVMLLTSDAPEYKPWALVIQDSNGENKIKMLSGGSKRTADGSEFEPKKKRKV

SEQ ID NO: 231 - protein, 2006 aa, Artificial Sequence
  Synthetic
MKRTADGSEFESPKKKRKVNPQIRNPMERMYRDTFYDNFENEPILYGRSYTWLCYEVKIKRGRSNLLWDTGVFRGQVYFKPQYHAEMCFLSWFCGNQLPAYKCFQITWFVSWTPCPDCVAKLAEFLSEHPNVTLTISAARLYYYWERDYRRALCRLSQAGARVTIMDYEEFAYCWENFVYNEGQQFMPWYKFDENYAFLHRTLKEILRYLMDPDTFTFNFNNDPLVLRRRQTYLCYEVERLDNGTWVLMDQHMGFLCNEAKNLLCGFYGRHAELRFLDLVPSLQLDPAQIYRVTWFISWSPCFSWGCAGEVRAFLQENTHVRLRIFAARIYDYDPLYKEALQMLRDAGAQVSIMTYDEFEYCWDTFVYRQGCPFQPWDGLEEHSQALSGRLRAILQNQGNSGGSSGGSSGSETPGTSESATPESSGGSSGGSDKKYSIGLAIGTNSVGWAVITDEYKVPSKKFKVLGNTDRHSIKKNLIGALLFDSGETAEATRLKRTARRRYTRRKNRICYLQEIFSNEMAKVDDSFFHRLEESFLVEEDKKHERHPIFGNIVDEVAYHEKYPTIYHLRKKLVDSTDKADLRLIYLALAHMIKFRGHFLIEGDLNPDNSDVDKLFIQLVQTYNQLFEENPINASGVDAKAILSARLSKSRRLENLIAQLPGEKKNGLFGNLIALSLGLTPNFKSNFDLAEDAKLQLSKDTYDDDLDNLLAQIGDQYADLFLAAKNLSDAILLSDILRVNTEITKAPLSASMIKRYDEHHQDLTLLKALVRQQLPEKYKEIFFDQSKNGYAGYIDGGASQEEFYKFIKPILEKMDGTEELLVKLNREDLLRKQRTFDNGSIPHQIHLGELHAILRRQEDFYPFLKDNREKIEKILTFRIPYYVGPLARGNSRFAWMTRKSEETITPWNFEEVVDKGASAQSFIERMTNFDKNLPNEKVLPKHSLLYEYFTVYNELTKVKYVTEGMRKPAFLSGEQKKAIVDLLFKTNRKVTVKQLKEDYFKKIECFDSVEISGVEDRFNASLGTYHDLLKIIKDKDFLDNEENEDILEDIVLTLTLFEDREMIEERLKTYAHLFDDKVMKQLKRRRYTGWGRLSRKLINGIRDKQSGKTILDFLKSDGFANRNFMQLIHDDSLTFKEDIQKAQVSGQGDSLHEHIANLAGSPAIKKGILQTVKVVDELVKVMGRHKPENIVIEMARENQTTQKGQKNSRERMKRIEEGIKELGSQILKEHPVENTQLQNEKLYLYYLQNGRDMYVDQELDINRLSDYDVDHIVPQSFLKDDSIDNKVLTRSDKNRGKSDNVPSEEVVKKMKNYWRQLLNAKLITQRKFDNLTKAERGGLSELDKAGFIKRQLVETRQITKHVAQILDSRMNTKYDENDKLIREVKVITLKSKLVSDFRKDFQFYKVREINNYHHAHDAYLNAVVGTALIKKYPKLESEFVYGDYKVYDVRKMIAKSEQEIGKATAKYFFYSNIMNFFKTEITLANGEIRKRPLIETNGETGEIVWDKGRDFATVRKVLSMPQVNIVKKTEVQTGGFSKESILPKRNSDKLIARKKDWDPKKYGGFDSPTVAYSVLVVAKVEKGKSKKLKSVKELLGITIMERSSFEKNPIDFLEAKGYKEVKKDLIIKLPKYSLFELENGRKRMLASAGELQKGNELALPSKYVNFLYLASHYEKLKGSPEDNEQKQLFVEQHKHYLDEIIEQISEFSKRVILADANLDKVLSAYNKHRDKPIREQAENIIHLFTLTNLGAPAAFKYFDTTIDRKRYTSTKEVLDATLIHQSITGLYETRIDLSQLGGDSGGSGGSGGSTNLSDIIEKETGKQLVIQESILMLPEEVEEVIGNKPESDILVHTAYDESTDENVMLLTSDAPEYKPWALVIQDSNGENKIKMLSGGSGGSGGSTNLSDIIEKETGKQLVIQESILMLPEEVEEVIGNKPESDILVHTAYDESTDENVMLLTSDAPEYKPWALVIQDSNGENKIKMLSGGSKRTADGSEFEPKKKRKV

SEQ ID NO: 232 - protein, 2008 aa, Artificial Sequence
  Synthetic
MKRTADGSEFESPKKKRKVKPHFRNTVERMYRDTFSYNFYNRPILSRRNTVWLCYEVKTKGPSRPPLDAKIFRGQVYSELKYHPEMRFFHWFSKWRKLHRDQEYEVTWYISWSPCTKCTRDMATFLAEDPKVTLTIFVARLYYFWDPDYQEALRSLCQKRDGPRATMKIMNYDEFQHCWSKFVYSQRELFEPWNNLPKYYILLHIMLGEILRHSMDPPTFTFNFNNEPWVRGRHETYLCYEVERMHNDTWVLLNQRRGFLCNQAPHKHGFLEGRHAELCFLDVIPFWKLDLDQDYRVTCFTSWSPCFSCAQEMAKFISKNKHVSLCIFTARIYDDQGRCQEGLRTLAEAGAKISIMTYSEFKHCWDTFVDHQGCPFQPWDGLDEHSQDLSGRLRAILQNQENSGGSSGGSSGSETPGTSESATPESSGGSSGGSDKKYSIGLAIGTNSVGWAVITDEYKVPSKKFKVLGNTDRHSIKKNLIGALLFDSGETAEATRLKRTARRRYTRRKNRICYLQEIFSNEMAKVDDSFFHRLEESFLVEEDKKHERHPIFGNIVDEVAYHEKYPTIYHLRKKLVDSTDKADLRLIYLALAHMIKFRGHFLIEGDLNPDNSDVDKLFIQLVQTYNQLFEENPINASGVDAKAILSARLSKSRRLENLIAQLPGEKKNGLFGNLIALSLGLTPNFKSNFDLAEDAKLQLSKDTYDDDLDNLLAQIGDQYADLFLAAKNLSDAILLSDILRVNTEITKAPLSASMIKRYDEHHQDLTLLKALVRQQLPEKYKEIFFDQSKNGYAGYIDGGASQEEFYKFIKPILEKMDGTEELLVKLNREDLLRKQRTFDNGSIPHQIHLGELHAILRRQEDFYPFLKDNREKIEKILTFRIPYYVGPLARGNSRFAWMTRKSEETITPWNFEEVVDKGASAQSFIERMTNFDKNLPNEKVLPKHSLLYEYFTVYNELTKVKYVTEGMRKPAFLSGEQKKAIVDLLFKTNRKVTVKQLKEDYFKKIECFDSVEISGVEDRFNASLGTYHDLLKIIKDKDFLDNEENEDILEDIVLTLTLFEDREMIEERLKTYAHLFDDKVMKQLKRRRYTGWGRLSRKLINGIRDKQSGKTILDFLKSDGFANRNFMQLIHDDSLTFKEDIQKAQVSGQGDSLHEHIANLAGSPAIKKGILQTVKVVDELVKVMGRHKPENIVIEMARENQTTQKGQKNSRERMKRIEEGIKELGSQILKEHPVENTQLQNEKLYLYYLQNGRDMYVDQELDINRLSDYDVDHIVPQSFLKDDSIDNKVLTRSDKNRGKSDNVPSEEVVKKMKNYWRQLLNAKLITQRKFDNLTKAERGGLSELDKAGFIKRQLVETRQITKHVAQILDSRMNTKYDENDKLIREVKVITLKSKLVSDFRKDFQFYKVREINNYHHAHDAYLNAVVGTALIKKYPKLESEFVYGDYKVYDVRKMIAKSEQEIGKATAKYFFYSNIMNFFKTEITLANGEIRKRPLIETNGETGEIVWDKGRDFATVRKVLSMPQVNIVKKTEVQTGGFSKESILPKRNSDKLIARKKDWDPKKYGGFDSPTVAYSVLVVAKVEKGKSKKLKSVKELLGITIMERSSFEKNPIDFLEAKGYKEVKKDLIIKLPKYSLFELENGRKRMLASAGELQKGNELALPSKYVNFLYLASHYEKLKGSPEDNEQKQLFVEQHKHYLDEIIEQISEFSKRVILADANLDKVLSAYNKHRDKPIREQAENIIHLFTLTNLGAPAAFKYFDTTIDRKRYTSTKEVLDATLIHQSITGLYETRIDLSQLGGDSGGSGGSGGSTNLSDIIEKETGKQLVIQESILMLPEEVEEVIGNKPESDILVHTAYDESTDENVMLLTSDAPEYKPWALVIQDSNGENKIKMLSGGSGGSGGSTNLSDIIEKETGKQLVIQESILMLPEEVEEVIGNKPESDILVHTAYDESTDENVMLLTSDAPEYKPWALVIQDSNGENKIKMLSGGSKRTADGSEFEPKKKRKV

SEQ ID NO: 233 - protein, 1822 aa, Artificial Sequence
  Synthetic
MKRTADGSEFESPKKKRKVDSLLMNRRKFLYQFKNVRWAKGRRETYLCYVVKRRDSATSFSLDFGYLRNKNGCHVELLFLRYISDWDLDPGRCYRVTWFTSWSPCYDCARHVADFLRGNPNLSLRIFTARLYFCEDRKAEPEGLRRLHRAGVQIAIMTFKDYFYCWNTFVENHERTFKAWEGLHENSVRLSRQLRRILLPLYEVDDLRDAFRTLGLSGGSSGGSSGSETPGTSESATPESSGGSSGGSDKKYSIGLAIGTNSVGWAVITDEYKVPSKKFKVLGNTDRHSIKKNLIGALLFDSGETAEATRLKRTARRRYTRRKNRICYLQEIFSNEMAKVDDSFFHRLEESFLVEEDKKHERHPIFGNIVDEVAYHEKYPTIYHLRKKLVDSTDKADLRLIYLALAHMIKFRGHFLIEGDLNPDNSDVDKLFIQLVQTYNQLFEENPINASGVDAKAILSARLSKSRRLENLIAQLPGEKKNGLFGNLIALSLGLTPNFKSNFDLAEDAKLQLSKDTYDDDLDNLLAQIGDQYADLFLAAKNLSDAILLSDILRVNTEITKAPLSASMIKRYDEHHQDLTLLKALVRQQLPEKYKEIFFDQSKNGYAGYIDGGASQEEFYKFIKPILEKMDGTEELLVKLNREDLLRKQRTFDNGSIPHQIHLGELHAILRRQEDFYPFLKDNREKIEKILTFRIPYYVGPLARGNSRFAWMTRKSEETITPWNFEEVVDKGASAQSFIERMTNFDKNLPNEKVLPKHSLLYEYFTVYNELTKVKYVTEGMRKPAFLSGEQKKAIVDLLFKTNRKVTVKQLKEDYFKKIECFDSVEISGVEDRFNASLGTYHDLLKIIKDKDFLDNEENEDILEDIVLTLTLFEDREMIEERLKTYAHLFDDKVMKQLKRRRYTGWGRLSRKLINGIRDKQSGKTILDFLKSDGFANRNFMQLIHDDSLTFKEDIQKAQVSGQGDSLHEHIANLAGSPAIKKGILQTVKVVDELVKVMGRHKPENIVIEMARENQTTQKGQKNSRERMKRIEEGIKELGSQILKEHPVENTQLQNEKLYLYYLQNGRDMYVDQELDINRLSDYDVDHIVPQSFLKDDSIDNKVLTRSDKNRGKSDNVPSEEVVKKMKNYWRQLLNAKLITQRKFDNLTKAERGGLSELDKAGFIKRQLVETRQITKHVAQILDSRMNTKYDENDKLIREVKVITLKSKLVSDFRKDFQFYKVREINNYHHAHDAYLNAVVGTALIKKYPKLESEFVYGDYKVYDVRKMIAKSEQEIGKATAKYFFYSNIMNFFKTEITLANGEIRKRPLIETNGETGEIVWDKGRDFATVRKVLSMPQVNIVKKTEVQTGGFSKESILPKRNSDKLIARKKDWDPKKYGGFDSPTVAYSVLVVAKVEKGKSKKLKSVKELLGITIMERSSFEKNPIDFLEAKGYKEVKKDLIIKLPKYSLFELENGRKRMLASAGELQKGNELALPSKYVNFLYLASHYEKLKGSPEDNEQKQLFVEQHKHYLDEIIEQISEFSKRVILADANLDKVLSAYNKHRDKPIREQAENIIHLFTLTNLGAPAAFKYFDTTIDRKRYTSTKEVLDATLIHQSITGLYETRIDLSQLGGDSGGSGGSGGSTNLSDIIEKETGKQLVIQESILMLPEEVEEVIGNKPESDILVHTAYDESTDENVMLLTSDAPEYKPWALVIQDSNGENKIKMLSGGSGGSGGSTNLSDIIEKETGKQLVIQESILMLPEEVEEVIGNKPESDILVHTAYDESTDENVMLLTSDAPEYKPWALVIQDSNGENKIKMLSGGSKRTADGSEFEPKKKRKV

SEQ ID NO: 234 - protein, 1832 aa, Artificial Sequence
  Synthetic
MKRTADGSEFESPKKKRKVTDAEYVRIHEKLDIYTFKKQFFNNKKSVSHRCYVLFELKRRGERRACFWGYAVNKPQSGTERGIHAEIFSIRKVEEYLRDNPGQFTINWYSSWSPCADCAEKILEWYNQELRGNGHTLKIWACKLYYEKNARNQIGLWNLRDNGVGLNVMVSEHYQCCRKIFIQSSHNQLNENRWLEKTLKRAEKRRSELSIMIQVKILHTTKSPAVSGGSSGGSSGSETPGTSESATPESSGGSSGGSDKKYSIGLAIGTNSVGWAVITDEYKVPSKKFKVLGNTDRHSIKKNLIGALLFDSGETAEATRLKRTARRRYTRRKNRICYLQEIFSNEMAKVDDSFFHRLEESFLVEEDKKHERHPIFGNIVDEVAYHEKYPTIYHLRKKLVDSTDKADLRLIYLALAHMIKFRGHFLIEGDLNPDNSDVDKLFIQLVQTYNQLFEENPINASGVDAKAILSARLSKSRRLENLIAQLPGEKKNGLFGNLIALSLGLTPNFKSNFDLAEDAKLQLSKDTYDDDLDNLLAQIGDQYADLFLAAKNLSDAILLSDILRVNTEITKAPLSASMIKRYDEHHQDLTLLKALVRQQLPEKYKEIFFDQSKNGYAGYIDGGASQEEFYKFIKPILEKMDGTEELLVKLNREDLLRKQRTFDNGSIPHQIHLGELHAILRRQEDFYPFLKDNREKIEKILTFRIPYYVGPLARGNSRFAWMTRKSEETITPWNFEEVVDKGASAQSFIERMTNFDKNLPNEKVLPKHSLLYEYFTVYNELTKVKYVTEGMRKPAFLSGEQKKAIVDLLFKTNRKVTVKQLKEDYFKKIECFDSVEISGVEDRFNASLGTYHDLLKIIKDKDFLDNEENEDILEDIVLTLTLFEDREMIEERLKTYAHLFDDKVMKQLKRRRYTGWGRLSRKLINGIRDKQSGKTILDFLKSDGFANRNFMQLIHDDSLTFKEDIQKAQVSGQGDSLHEHIANLAGSPAIKKGILQTVKVVDELVKVMGRHKPENIVIEMARENQTTQKGQKNSRERMKRIEEGIKELGSQILKEHPVENTQLQNEKLYLYYLQNGRDMYVDQELDINRLSDYDVDHIVPQSFLKDDSIDNKVLTRSDKNRGKSDNVPSEEVVKKMKNYWRQLLNAKLITQRKFDNLTKAERGGLSELDKAGFIKRQLVETRQITKHVAQILDSRMNTKYDENDKLIREVKVITLKSKLVSDFRKDFQFYKVREINNYHHAHDAYLNAVVGTALIKKYPKLESEFVYGDYKVYDVRKMIAKSEQEIGKATAKYFFYSNIMNFFKTEITLANGEIRKRPLIETNGETGEIVWDKGRDFATVRKVLSMPQVNIVKKTEVQTGGFSKESILPKRNSDKLIARKKDWDPKKYGGFDSPTVAYSVLVVAKVEKGKSKKLKSVKELLGITIMERSSFEKNPIDFLEAKGYKEVKKDLIIKLPKYSLFELENGRKRMLASAGELQKGNELALPSKYVNFLYLASHYEKLKGSPEDNEQKQLFVEQHKHYLDEIIEQISEFSKRVILADANLDKVLSAYNKHRDKPIREQAENIIHLFTLTNLGAPAAFKYFDTTIDRKRYTSTKEVLDATLIHQSITGLYETRIDLSQLGGDSGGSGGSGGSTNLSDIIEKETGKQLVIQESILMLPEEVEEVIGNKPESDILVHTAYDESTDENVMLLTSDAPEYKPWALVIQDSNGENKIKMLSGGSGGSGGSTNLSDIIEKETGKQLVIQESILMLPEEVEEVIGNKPESDILVHTAYDESTDENVMLLTSDAPEYKPWALVIQDSNGENKIKMLSGGSKRTADGSEFEPKKKRKV

SEQ ID NO: 235 - protein, 1786 aa, Artificial Sequence
  Synthetic
MKRTADGSEFESPKKKRKVFERNYDPRELRKETYLLYEIKWGKSGKLWRHWCQNNRTQHAEVYFLENIFNARRFNPSTHCSITWYLSWSPCAECSQKIVDFLKEHPNVNLEIYVARLYYHEDERNRQGLRDLVNSGVTIRIMDLPDYNYCWKTFVSDQGGDEDYWPGHFAPWIKQYSLKLSGGSSGGSSGSETPGTSESATPESSGGSSGGSDKKYSIGLAIGTNSVGWAVITDEYKVPSKKFKVLGNTDRHSIKKNLIGALLFDSGETAEATRLKRTARRRYTRRKNRICYLQEIFSNEMAKVDDSFFHRLEESFLVEEDKKHERHPIFGNIVDEVAYHEKYPTIYHLRKKLVDSTDKADLRLIYLALAHMIKFRGHFLIEGDLNPDNSDVDKLFIQLVQTYNQLFEENPINASGVDAKAILSARLSKSRRLENLIAQLPGEKKNGLFGNLIALSLGLTPNFKSNFDLAEDAKLQLSKDTYDDDLDNLLAQIGDQYADLFLAAKNLSDAILLSDILRVNTEITKAPLSASMIKRYDEHHQDLTLLKALVRQQLPEKYKEIFFDQSKNGYAGYIDGGASQEEFYKFIKPILEKMDGTEELLVKLNREDLLRKQRTFDNGSIPHQIHLGELHAILRRQEDFYPFLKDNREKIEKILTFRIPYYVGPLARGNSRFAWMTRKSEETITPWNFEEVVDKGASAQSFIERMTNFDKNLPNEKVLPKHSLLYEYFTVYNELTKVKYVTEGMRKPAFLSGEQKKAIVDLLFKTNRKVTVKQLKEDYFKKIECFDSVEISGVEDRFNASLGTYHDLLKIIKDKDFLDNEENEDILEDIVLTLTLFEDREMIEERLKTYAHLFDDKVMKQLKRRRYTGWGRLSRKLINGIRDKQSGKTILDFLKSDGFANRNFMQLIHDDSLTFKEDIQKAQVSGQGDSLHEHIANLAGSPAIKKGILQTVKVVDELVKVMGRHKPENIVIEMARENQTTQKGQKNSRERMKRIEEGIKELGSQILKEHPVENTQLQNEKLYLYYLQNGRDMYVDQELDINRLSDYDVDHIVPQSFLKDDSIDNKVLTRSDKNRGKSDNVPSEEVVKKMKNYWRQLLNAKLITQRKFDNLTKAERGGLSELDKAGFIKRQLVETRQITKHVAQILDSRMNTKYDENDKLIREVKVITLKSKLVSDFRKDFQFYKVREINNYHHAHDAYLNAVVGTALIKKYPKLESEFVYGDYKVYDVRKMIAKSEQEIGKATAKYFFYSNIMNFFKTEITLANGEIRKRPLIETNGETGEIVWDKGRDFATVRKVLSMPQVNIVKKTEVQTGGFSKESILPKRNSDKLIARKKDWDPKKYGGFDSPTVAYSVLVVAKVEKGKSKKLKSVKELLGITIMERSSFEKNPIDFLEAKGYKEVKKDLIIKLPKYSLFELENGRKRMLASAGELQKGNELALPSKYVNFLYLASHYEKLKGSPEDNEQKQLFVEQHKHYLDEIIEQISEFSKRVILADANLDKVLSAYNKHRDKPIREQAENIIHLFTLTNLGAPAAFKYFDTTIDRKRYTSTKEVLDATLIHQSITGLYETRIDLSQLGGDSGGSGGSGGSTNLSDIIEKETGKQLVIQESILMLPEEVEEVIGNKPESDILVHTAYDESTDENVMLLTSDAPEYKPWALVIQDSNGENKIKMLSGGSGGSGGSTNLSDIIEKETGKQLVIQESILMLPEEVEEVIGNKPESDILVHTAYDESTDENVMLLTSDAPEYKPWALVIQDSNGENKIKMLSGGSKRTADGSEFEPKKKRKV

SEQ ID NO: 236 - protein, 1823 aa, Artificial Sequence
  Synthetic
MKRTADGSEFESPKKKRKVEASPASGPRHLMDPHIFTSNFNNGIGRHKTYLCYEVERLDNGTSVKMDQHRGFLHGQAKNLLCGFYGRHAELRFLDLVPSLQLDPAQIYRVTWFISWSPCFSWGCAGEVRAFLQENTHVRLRIFAARIYDYDPLYKEALQMLRDAGAQVSIMTYDEFKHCWDTFVDHQGCPFQPWDGLDEHSQALSGRLRAILQNQGNSGGSSGGSSGSETPGTSESATPESSGGSSGGSDKKYSIGLAIGTNSVGWAVITDEYKVPSKKFKVLGNTDRHSIKKNLIGALLFDSGETAEATRLKRTARRRYTRRKNRICYLQEIFSNEMAKVDDSFFHRLEESFLVEEDKKHERHPIFGNIVDEVAYHEKYPTIYHLRKKLVDSTDKADLRLIYLALAHMIKFRGHFLIEGDLNPDNSDVDKLFIQLVQTYNQLFEENPINASGVDAKAILSARLSKSRRLENLIAQLPGEKKNGLFGNLIALSLGLTPNFKSNFDLAEDAKLQLSKDTYDDDLDNLLAQIGDQYADLFLAAKNLSDAILLSDILRVNTEITKAPLSASMIKRYDEHHQDLTLLKALVRQQLPEKYKEIFFDQSKNGYAGYIDGGASQEEFYKFIKPILEKMDGTEELLVKLNREDLLRKQRTFDNGSIPHQIHLGELHAILRRQEDFYPFLKDNREKIEKILTFRIPYYVGPLARGNSRFAWMTRKSEETITPWNFEEVVDKGASAQSFIERMTNFDKNLPNEKVLPKHSLLYEYFTVYNELTKVKYVTEGMRKPAFLSGEQKKAIVDLLFKTNRKVTVKQLKEDYFKKIECFDSVEISGVEDRFNASLGTYHDLLKIIKDKDFLDNEENEDILEDIVLTLTLFEDREMIEERLKTYAHLFDDKVMKQLKRRRYTGWGRLSRKLINGIRDKQSGKTILDFLKSDGFANRNFMQLIHDDSLTFKEDIQKAQVSGQGDSLHEHIANLAGSPAIKKGILQTVKVVDELVKVMGRHKPENIVIEMARENQTTQKGQKNSRERMKRIEEGIKELGSQILKEHPVENTQLQNEKLYLYYLQNGRDMYVDQELDINRLSDYDVDHIVPQSFLKDDSIDNKVLTRSDKNRGKSDNVPSEEVVKKMKNYWRQLLNAKLITQRKFDNLTKAERGGLSELDKAGFIKRQLVETRQITKHVAQILDSRMNTKYDENDKLIREVKVITLKSKLVSDFRKDFQFYKVREINNYHHAHDAYLNAVVGTALIKKYPKLESEFVYGDYKVYDVRKMIAKSEQEIGKATAKYFFYSNIMNFFKTEITLANGEIRKRPLIETNGETGEIVWDKGRDFATVRKVLSMPQVNIVKKTEVQTGGFSKESILPKRNSDKLIARKKDWDPKKYGGFDSPTVAYSVLVVAKVEKGKSKKLKSVKELLGITIMERSSFEKNPIDFLEAKGYKEVKKDLIIKLPKYSLFELENGRKRMLASAGELQKGNELALPSKYVNFLYLASHYEKLKGSPEDNEQKQLFVEQHKHYLDEIIEQISEFSKRVILADANLDKVLSAYNKHRDKPIREQAENIIHLFTLTNLGAPAAFKYFDTTIDRKRYTSTKEVLDATLIHQSITGLYETRIDLSQLGGDSGGSGGSGGSTNLSDIIEKETGKQLVIQESILMLPEEVEEVIGNKPESDILVHTAYDESTDENVMLLTSDAPEYKPWALVIQDSNGENKIKMLSGGSGGSGGSTNLSDIIEKETGKQLVIQESILMLPEEVEEVIGNKPESDILVHTAYDESTDENVMLLTSDAPEYKPWALVIQDSNGENKIKMLSGGSKRTADGSEFEPKKKRKV

SEQ ID NO: 237 - protein, 1853 aa, Artificial Sequence
  Synthetic
MKRTADGSEFESPKKKRKVSSETGPVAVDPTLRRRIEPHEFEVFFDPRELAAETCLLYEINWGGRHSIWRHTSQNTNKHVEVNFIEKFTTERYFCPNTRCSITWFLSWSPCGECSRAITEFLSRYPHVTLFIYIARLYHLANPRNRQGLRDLISSGVTIQIMTEQESGYCWRNFVNYSPSNEAHWPRYPHLWVRLYVLELYCIILGLPPCLNILRRKQPQLTFFTIALQSCHYQRLPPHILWATGLKSGGSSGGSSGSETPGTSESATPESSGGSSGGSDKKYSIGLAIGTNSVGWAVITDEYKVPSKKFKVLGNTDRHSIKKNLIGALLFDSGETAEATRLKRTARRRYTRRKNRICYLQEIFSNEMAKVDDSFFHRLEESFLVEEDKKHERHPIFGNIVDEVAYHEKYPTIYHLRKKLVDSTDKADLRLIYLALAHMIKFRGHFLIEGDLNPDNSDVDKLFIQLVQTYNQLFEENPINASGVDAKAILSARLSKSRRLENLIAQLPGEKKNGLFGNLIALSLGLTPNFKSNFDLAEDAKLQLSKDTYDDDLDNLLAQIGDQYADLFLAAKNLSDAILLSDILRVNTEITKAPLSASMIKRYDEHHQDLTLLKALVRQQLPEKYKEIFFDQSKNGYAGYIDGGASQEEFYKFIKPILEKMDGTEELLVKLNREDLLRKQRTFDNGSIPHQIHLGELHAILRRQEDFYPFLKDNREKIEKILTFRIPYYVGPLARGNSRFAWMTRKSEETITPWNFEEVVDKGASAQSFIERMTNFDKNLPNEKVLPKHSLLYEYFTVYNELTKVKYVTEGMRKPAFLSGEQKKAIVDLLFKTNRKVTVKQLKEDYFKKIECFDSVEISGVEDRFNASLGTYHDLLKIIKDKDFLDNEENEDILEDIVLTLTLFEDREMIEERLKTYAHLFDDKVMKQLKRRRYTGWGRLSRKLINGIRDKQSGKTILDFLKSDGFANRNFMQLIHDDSLTFKEDIQKAQVSGQGDSLHEHIANLAGSPAIKKGILQTVKVVDELVKVMGRHKPENIVIEMARENQTTQKGQKNSRERMKRIEEGIKELGSQILKEHPVENTQLQNEKLYLYYLQNGRDMYVDQELDINRLSDYDVDHIVPQSFLKDDSIDNKVLTRSDKNRGKSDNVPSEEVVKKMKNYWRQLLNAKLITQRKFDNLTKAERGGLSELDKAGFIKRQLVETRQITKHVAQILDSRMNTKYDENDKLIREVKVITLKSKLVSDFRKDFQFYKVREINNYHHAHDAYLNAVVGTALIKKYPKLESEFVYGDYKVYDVRKMIAKSEQEIGKATAKYFFYSNIMNFFKTEITLANGEIRKRPLIETNGETGEIVWDKGRDFATVRKVLSMPQVNIVKKTEVQTGGFSKESILPKRNSDKLIARKKDWDPKKYGGFDSPTVAYSVLVVAKVEKGKSKKLKSVKELLGITIMERSSFEKNPIDFLEAKGYKEVKKDLIIKLPKYSLFELENGRKRMLASAGELQKGNELALPSKYVNFLYLASHYEKLKGSPEDNEQKQLFVEQHKHYLDEIIEQISEFSKRVILADANLDKVLSAYNKHRDKPIREQAENIIHLFTLTNLGAPAAFKYFDTTIDRKRYTSTKEVLDATLIHQSITGLYETRIDLSQLGGDSGGSGGSGGSTNLSDIIEKETGKQLVIQESILMLPEEVEEVIGNKPESDILVHTAYDESTDENVMLLTSDAPEYKPWALVIQDSNGENKIKMLSGGSGGSGGSTNLSDIIEKETGKQLVIQESILMLPEEVEEVIGNKPESDILVHTAYDESTDENVMLLTSDAPEYKPWALVIQDSNGENKIKMLSGGSKRTADGSEFEPKKKRKV

SEQ ID NO: 238 - protein, 1853 aa, Artificial Sequence
  Synthetic
MKRTADGSEFESPKKKRKVSSETGPVAVDPTLRRRIEPHEFEVFFDPRELRKETCLLYEINWGGRHSIWRHTSQNTNKHVEVNFIEKFTTERYFCPNTRCSITWFLSWSPCGECSRAITEFLSRYPHVTLFIYIARLYHHADPRNRQGLRDLISSGVTIQIMTEQESGYCWRNFVNYSPSNEAHWPRYPHLWVRLYVLELYCIILGLPPCLNILRRKQPQLTFFTIALQSCHYQRLPPHILWATGLKSGGSSGGSSGSETPGTSESATPESSGGSSGGSDKKYSIGLAIGTNSVGWAVITDEYKVPSKKFKVLGNTDRHSIKKNLIGALLFDSGETAEATRLKRTARRRYTRRKNRICYLQEIFSNEMAKVDDSFFHRLEESFLVEEDKKHERHPIFGNIVDEVAYHEKYPTIYHLRKKLVDSTDKADLRLIYLALAHMIKFRGHFLIEGDLNPDNSDVDKLFIQLVQTYNQLFEENPINASGVDAKAILSARLSKSRRLENLIAQLPGEKKNGLFGNLIALSLGLTPNFKSNFDLAEDAKLQLSKDTYDDDLDNLLAQIGDQYADLFLAAKNLSDAILLSDILRVNTEITKAPLSASMIKRYDEHHQDLTLLKALVRQQLPEKYKEIFFDQSKNGYAGYIDGGASQEEFYKFIKPILEKMDGTEELLVKLNREDLLRKQRTFDNGSIPHQIHLGELHAILRRQEDFYPFLKDNREKIEKILTFRIPYYVGPLARGNSRFAWMTRKSEETITPWNFEEVVDKGASAQSFIERMTNFDKNLPNEKVLPKHSLLYEYFTVYNELTKVKYVTEGMRKPAFLSGEQKKAIVDLLFKTNRKVTVKQLKEDYFKKIECFDSVEISGVEDRFNASLGTYHDLLKIIKDKDFLDNEENEDILEDIVLTLTLFEDREMIEERLKTYAHLFDDKVMKQLKRRRYTGWGRLSRKLINGIRDKQSGKTILDFLKSDGFANRNFMQLIHDDSLTFKEDIQKAQVSGQGDSLHEHIANLAGSPAIKKGILQTVKVVDELVKVMGRHKPENIVIEMARENQTTQKGQKNSRERMKRIEEGIKELGSQILKEHPVENTQLQNEKLYLYYLQNGRDMYVDQELDINRLSDYDVDHIVPQSFLKDDSIDNKVLTRSDKNRGKSDNVPSEEVVKKMKNYWRQLLNAKLITQRKFDNLTKAERGGLSELDKAGFIKRQLVETRQITKHVAQILDSRMNTKYDENDKLIREVKVITLKSKLVSDFRKDFQFYKVREINNYHHAHDAYLNAVVGTALIKKYPKLESEFVYGDYKVYDVRKMIAKSEQEIGKATAKYFFYSNIMNFFKTEITLANGEIRKRPLIETNGETGEIVWDKGRDFATVRKVLSMPQVNIVKKTEVQTGGFSKESIRPKRNSDKLIARKKDWDPKKYGGFVSPTVAYSVLVVAKVEKGKSKKLKSVKELLGITIMERSSFEKNPIDFLEAKGYKEVKKDLIIKLPKYSLFELENGRKRMLASARFLQKGNELALPSKYVNFLYLASHYEKLKGSPEDNEQKQLFVEQHKHYLDEIIEQISEFSKRVILADANLDKVLSAYNKHRDKPIREQAENIIHLFTLTNLGAPRAFKYFDTTIDRKVYRSTKEVLDATLIHQSITGLYETRIDLSQLGGDSGGSGGSGGSTNLSDIIEKETGKQLVIQESILMLPEEVEEVIGNKPESDILVHTAYDESTDENVMLLTSDAPEYKPWALVIQDSNGENKIKMLSGGSGGSGGSTNLSDIIEKETGKQLVIQESILMLPEEVEEVIGNKPESDILVHTAYDESTDENVMLLTSDAPEYKPWALVIQDSNGENKIKMLSGGSKRTADGSEFEPKKKRKV

SEQ ID NO: 239 - protein, 1853 aa, Artificial Sequence
  Synthetic
MKRTADGSEFESPKKKRKVSSETGPVAVDPTLRRRIEPHEFEVFFDPRELRKETCLLYEINWGGRHSIWRHTSQNTNKHVEVNFIEKFTTERYFCPNTRCSITWFLSYSPCGECSRAITEFLSRYPHVTLFIYIARLYHHADPENRQGLRDLISSGVTIQIMTEQESGYCWRNFVNYSPSNEAHWPRYPHLWVRLYVLELYCIILGLPPCLNILRRKQPQLTFFTIALQSCHYQRLPPHILWATGLKSGGSSGGSSGSETPGTSESATPESSGGSSGGSDKKYSIGLAIGTNSVGWAVITDEYKVPSKKFKVLGNTDRHSIKKNLIGALLFDSGETAEATRLKRTARRRYTRRKNRICYLQEIFSNEMAKVDDSFFHRLEESFLVEEDKKHERHPIFGNIVDEVAYHEKYPTIYHLRKKLVDSTDKADLRLIYLALAHMIKFRGHFLIEGDLNPDNSDVDKLFIQLVQTYNQLFEENPINASGVDAKAILSARLSKSRRLENLIAQLPGEKKNGLFGNLIALSLGLTPNFKSNFDLAEDAKLQLSKDTYDDDLDNLLAQIGDQYADLFLAAKNLSDAILLSDILRVNTEITKAPLSASMIKRYDEHHQDLTLLKALVRQQLPEKYKEIFFDQSKNGYAGYIDGGASQEEFYKFIKPILEKMDGTEELLVKLNREDLLRKQRTFDNGSIPHQIHLGELHAILRRQEDFYPFLKDNREKIEKILTFRIPYYVGPLARGNSRFAWMTRKSEETITPWNFEEVVDKGASAQSFIERMTNFDKNLPNEKVLPKHSLLYEYFTVYNELTKVKYVTEGMRKPAFLSGEQKKAIVDLLFKTNRKVTVKQLKEDYFKKIECFDSVEISGVEDRFNASLGTYHDLLKIIKDKDFLDNEENEDILEDIVLTLTLFEDREMIEERLKTYAHLFDDKVMKQLKRRRYTGWGRLSRKLINGIRDKQSGKTILDFLKSDGFANRNFMQLIHDDSLTFKEDIQKAQVSGQGDSLHEHIANLAGSPAIKKGILQTVKVVDELVKVMGRHKPENIVIEMARENQTTQKGQKNSRERMKRIEEGIKELGSQILKEHPVENTQLQNEKLYLYYLQNGRDMYVDQELDINRLSDYDVDHIVPQSFLKDDSIDNKVLTRSDKNRGKSDNVPSEEVVKKMKNYWRQLLNAKLITQRKFDNLTKAERGGLSELDKAGFIKRQLVETRQITKHVAQILDSRMNTKYDENDKLIREVKVITLKSKLVSDFRKDFQFYKVREINNYHHAHDAYLNAVVGTALIKKYPKLESEFVYGDYKVYDVRKMIAKSEQEIGKATAKYFFYSNIMNFFKTEITLANGEIRKRPLIETNGETGEIVWDKGRDFATVRKVLSMPQVNIVKKTEVQTGGFSKESIRPKRNSDKLIARKKDWDPKKYGGFVSPTVAYSVLVVAKVEKGKSKKLKSVKELLGITIMERSSFEKNPIDFLEAKGYKEVKKDLIIKLPKYSLFELENGRKRMLASARFLQKGNELALPSKYVNFLYLASHYEKLKGSPEDNEQKQLFVEQHKHYLDEIIEQISEFSKRVILADANLDKVLSAYNKHRDKPIREQAENIIHLFTLTNLGAPRAFKYFDTTIDRKVYRSTKEVLDATLIHQSITGLYETRIDLSQLGGDSGGSGGSGGSTNLSDIIEKETGKQLVIQESILMLPEEVEEVIGNKPESDILVHTAYDESTDENVMLLTSDAPEYKPWALVIQDSNGENKIKMLSGGSGGSGGSTNLSDIIEKETGKQLVIQESILMLPEEVEEVIGNKPESDILVHTAYDESTDENVMLLTSDAPEYKPWALVIQDSNGENKIKMLSGGSKRTADGSEFEPKKKRKV

SEQ ID NO: 240 - protein, 1853 aa, Artificial Sequence
  Synthetic
MKRTADGSEFESPKKKRKVSSETGPVAVDPTLRRRIEPHEFEVFFDPRELRKETCLLYEINWGGRHSIWRHTSQNTNKHVEVNFIEKFTTERYFCPNTRCSITWFLSYSPCGECSRAITEFLSRYPHVTLFIYIARLYHHADPRNRQGLEDLISSGVTIQIMTEQESGYCWRNFVNYSPSNEAHWPRYPHLWVRLYVLELYCIILGLPPCLNILRRKQPQLTFFTIALQSCHYQRLPPHILWATGLKSGGSSGGSSGSETPGTSESATPESSGGSSGGSDKKYSIGLAIGTNSVGWAVITDEYKVPSKKFKVLGNTDRHSIKKNLIGALLFDSGETAEATRLKRTARRRYTRRKNRICYLQEIFSNEMAKVDDSFFHRLEESFLVEEDKKHERHPIFGNIVDEVAYHEKYPTIYHLRKKLVDSTDKADLRLIYLALAHMIKFRGHFLIEGDLNPDNSDVDKLFIQLVQTYNQLFEENPINASGVDAKAILSARLSKSRRLENLIAQLPGEKKNGLFGNLIALSLGLTPNFKSNFDLAEDAKLQLSKDTYDDDLDNLLAQIGDQYADLFLAAKNLSDAILLSDILRVNTEITKAPLSASMIKRYDEHHQDLTLLKALVRQQLPEKYKEIFFDQSKNGYAGYIDGGASQEEFYKFIKPILEKMDGTEELLVKLNREDLLRKQRTFDNGSIPHQIHLGELHAILRRQEDFYPFLKDNREKIEKILTFRIPYYVGPLARGNSRFAWMTRKSEETITPWNFEEVVDKGASAQSFIERMTNFDKNLPNEKVLPKHSLLYEYFTVYNELTKVKYVTEGMRKPAFLSGEQKKAIVDLLFKTNRKVTVKQLKEDYFKKIECFDSVEISGVEDRFNASLGTYHDLLKIIKDKDFLDNEENEDILEDIVLTLTLFEDREMIEERLKTYAHLFDDKVMKQLKRRRYTGWGRLSRKLINGIRDKQSGKTILDFLKSDGFANRNFMQLIHDDSLTFKEDIQKAQVSGQGDSLHEHIANLAGSPAIKKGILQTVKVVDELVKVMGRHKPENIVIEMARENQTTQKGQKNSRERMKRIEEGIKELGSQILKEHPVENTQLQNEKLYLYYLQNGRDMYVDQELDINRLSDYDVDHIVPQSFLKDDSIDNKVLTRSDKNRGKSDNVPSEEVVKKMKNYWRQLLNAKLITQRKFDNLTKAERGGLSELDKAGFIKRQLVETRQITKHVAQILDSRMNTKYDENDKLIREVKVITLKSKLVSDFRKDFQFYKVREINNYHHAHDAYLNAVVGTALIKKYPKLESEFVYGDYKVYDVRKMIAKSEQEIGKATAKYFFYSNIMNFFKTEITLANGEIRKRPLIETNGETGEIVWDKGRDFATVRKVLSMPQVNIVKKTEVQTGGFSKESIRPKRNSDKLIARKKDWDPKKYGGFVSPTVAYSVLVVAKVEKGKSKKLKSVKELLGITIMERSSFEKNPIDFLEAKGYKEVKKDLIIKLPKYSLFELENGRKRMLASARFLQKGNELALPSKYVNFLYLASHYEKLKGSPEDNEQKQLFVEQHKHYLDEIIEQISEFSKRVILADANLDKVLSAYNKHRDKPIREQAENIIHLFTLTNLGAPRAFKYFDTTIDRKVYRSTKEVLDATLIHQSITGLYETRIDLSQLGGDSGGSGGSGGSTNLSDIIEKETGKQLVIQESILMLPEEVEEVIGNKPESDILVHTAYDESTDENVMLLTSDAPEYKPWALVIQDSNGENKIKMLSGGSGGSGGSTNLSDIIEKETGKQLVIQESILMLPEEVEEVIGNKPESDILVHTAYDESTDENVMLLTSDAPEYKPWALVIQDSNGENKIKMLSGGSKRTADGSEFEPKKKRKV

SEQ ID NO: 241 - protein, 1853 aa, Artificial Sequence
  Synthetic
MKRTADGSEFESPKKKRKVSSETGPVAVDPTLRRRIEPHEFEVFFDPRELRKETCLLYEINWGGRHSIWRHTSQNTNKHVEVNFIEKFTTERYFCPNTRCSITWFLSYSPCGECSRAITEFLSRYPHVTLFIYIARLYHHADPENRQGLEDLISSGVTIQIMTEQESGYCWRNFVNYSPSNEAHWPRYPHLWVRLYVLELYCIILGLPPCLNILRRKQPQLTFFTIALQSCHYQRLPPHILWATGLKSGGSSGGSSGSETPGTSESATPESSGGSSGGSDKKYSIGLAIGTNSVGWAVITDEYKVPSKKFKVLGNTDRHSIKKNLIGALLFDSGETAEATRLKRTARRRYTRRKNRICYLQEIFSNEMAKVDDSFFHRLEESFLVEEDKKHERHPIFGNIVDEVAYHEKYPTIYHLRKKLVDSTDKADLRLIYLALAHMIKFRGHFLIEGDLNPDNSDVDKLFIQLVQTYNQLFEENPINASGVDAKAILSARLSKSRRLENLIAQLPGEKKNGLFGNLIALSLGLTPNFKSNFDLAEDAKLQLSKDTYDDDLDNLLAQIGDQYADLFLAAKNLSDAILLSDILRVNTEITKAPLSASMIKRYDEHHQDLTLLKALVRQQLPEKYKEIFFDQSKNGYAGYIDGGASQEEFYKFIKPILEKMDGTEELLVKLNREDLLRKQRTFDNGSIPHQIHLGELHAILRRQEDFYPFLKDNREKIEKILTFRIPYYVGPLARGNSRFAWMTRKSEETITPWNFEEVVDKGASAQSFIERMTNFDKNLPNEKVLPKHSLLYEYFTVYNELTKVKYVTEGMRKPAFLSGEQKKAIVDLLFKTNRKVTVKQLKEDYFKKIECFDSVEISGVEDRFNASLGTYHDLLKIIKDKDFLDNEENEDILEDIVLTLTLFEDREMIEERLKTYAHLFDDKVMKQLKRRRYTGWGRLSRKLINGIRDKQSGKTILDFLKSDGFANRNFMQLIHDDSLTFKEDIQKAQVSGQGDSLHEHIANLAGSPAIKKGILQTVKVVDELVKVMGRHKPENIVIEMARENQTTQKGQKNSRERMKRIEEGIKELGSQILKEHPVENTQLQNEKLYLYYLQNGRDMYVDQELDINRLSDYDVDHIVPQSFLKDDSIDNKVLTRSDKNRGKSDNVPSEEVVKKMKNYWRQLLNAKLITQRKFDNLTKAERGGLSELDKAGFIKRQLVETRQITKHVAQILDSRMNTKYDENDKLIREVKVITLKSKLVSDFRKDFQFYKVREINNYHHAHDAYLNAVVGTALIKKYPKLESEFVYGDYKVYDVRKMIAKSEQEIGKATAKYFFYSNIMNFFKTEITLANGEIRKRPLIETNGETGEIVWDKGRDFATVRKVLSMPQVNIVKKTEVQTGGFSKESIRPKRNSDKLIARKKDWDPKKYGGFVSPTVAYSVLVVAKVEKGKSKKLKSVKELLGITIMERSSFEKNPIDFLEAKGYKEVKKDLIIKLPKYSLFELENGRKRMLASARFLQKGNELALPSKYVNFLYLASHYEKLKGSPEDNEQKQLFVEQHKHYLDEIIEQISEFSKRVILADANLDKVLSAYNKHRDKPIREQAENIIHLFTLTNLGAPRAFKYFDTTIDRKVYRSTKEVLDATLIHQSITGLYETRIDLSQLGGDSGGSGGSGGSTNLSDIIEKETGKQLVIQESILMLPEEVEEVIGNKPESDILVHTAYDESTDENVMLLTSDAPEYKPWALVIQDSNGENKIKMLSGGSGGSGGSTNLSDIIEKETGKQLVIQESILMLPEEVEEVIGNKPESDILVHTAYDESTDENVMLLTSDAPEYKPWALVIQDSNGENKIKMLSGGSKRTADGSEFEPKKKRKV

SEQ ID NO: 242 - protein, 1853 aa, Artificial Sequence
  Synthetic
MKRTADGSEFESPKKKRKVSSETGPVAVDPTLRRRIEPHEFEVFFDPRELRKETCLLYEINWGGRHSIWRHTSQNTNKHVEVNFIEKFTTERYFCPNTRCSITWFLSWSPCGECSRAITEFLSRYPHVTLFIYIARLYHHADPENRQGLEDLISSGVTIQIMTEQESGYCWRNFVNYSPSNEAHWPRYPHLWVRLYVLELYCIILGLPPCLNILRRKQPQLTFFTIALQSCHYQRLPPHILWATGLKSGGSSGGSSGSETPGTSESATPESSGGSSGGSDKKYSIGLAIGTNSVGWAVITDEYKVPSKKFKVLGNTDRHSIKKNLIGALLFDSGETAEATRLKRTARRRYTRRKNRICYLQEIFSNEMAKVDDSFFHRLEESFLVEEDKKHERHPIFGNIVDEVAYHEKYPTIYHLRKKLVDSTDKADLRLIYLALAHMIKFRGHFLIEGDLNPDNSDVDKLFIQLVQTYNQLFEENPINASGVDAKAILSARLSKSRRLENLIAQLPGEKKNGLFGNLIALSLGLTPNFKSNFDLAEDAKLQLSKDTYDDDLDNLLAQIGDQYADLFLAAKNLSDAILLSDILRVNTEITKAPLSASMIKRYDEHHQDLTLLKALVRQQLPEKYKEIFFDQSKNGYAGYIDGGASQEEFYKFIKPILEKMDGTEELLVKLNREDLLRKQRTFDNGSIPHQIHLGELHAILRRQEDFYPFLKDNREKIEKILTFRIPYYVGPLARGNSRFAWMTRKSEETITPWNFEEVVDKGASAQSFIERMTNFDKNLPNEKVLPKHSLLYEYFTVYNELTKVKYVTEGMRKPAFLSGEQKKAIVDLLFKTNRKVTVKQLKEDYFKKIECFDSVEISGVEDRFNASLGTYHDLLKIIKDKDFLDNEENEDILEDIVLTLTLFEDREMIEERLKTYAHLFDDKVMKQLKRRRYTGWGRLSRKLINGIRDKQSGKTILDFLKSDGFANRNFMQLIHDDSLTFKEDIQKAQVSGQGDSLHEHIANLAGSPAIKKGILQTVKVVDELVKVMGRHKPENIVIEMARENQTTQKGQKNSRERMKRIEEGIKELGSQILKEHPVENTQLQNEKLYLYYLQNGRDMYVDQELDINRLSDYDVDHIVPQSFLKDDSIDNKVLTRSDKNRGKSDNVPSEEVVKKMKNYWRQLLNAKLITQRKFDNLTKAERGGLSELDKAGFIKRQLVETRQITKHVAQILDSRMNTKYDENDKLIREVKVITLKSKLVSDFRKDFQFYKVREINNYHHAHDAYLNAVVGTALIKKYPKLESEFVYGDYKVYDVRKMIAKSEQEIGKATAKYFFYSNIMNFFKTEITLANGEIRKRPLIETNGETGEIVWDKGRDFATVRKVLSMPQVNIVKKTEVQTGGFSKESIRPKRNSDKLIARKKDWDPKKYGGFVSPTVAYSVLVVAKVEKGKSKKLKSVKELLGITIMERSSFEKNPIDFLEAKGYKEVKKDLIIKLPKYSLFELENGRKRMLASARFLQKGNELALPSKYVNFLYLASHYEKLKGSPEDNEQKQLFVEQHKHYLDEIIEQISEFSKRVILADANLDKVLSAYNKHRDKPIREQAENIIHLFTLTNLGAPRAFKYFDTTIDRKVYRSTKEVLDATLIHQSITGLYETRIDLSQLGGDSGGSGGSGGSTNLSDIIEKETGKQLVIQESILMLPEEVEEVIGNKPESDILVHTAYDESTDENVMLLTSDAPEYKPWALVIQDSNGENKIKMLSGGSGGSGGSTNLSDIIEKETGKQLVIQESILMLPEEVEEVIGNKPESDILVHTAYDESTDENVMLLTSDAPEYKPWALVIQDSNGENKIKMLSGGSKRTADGSEFEPKKKRKV

SEQ ID NO: 243 - protein, 1853 aa, Artificial Sequence
  Synthetic
MKRTADGSEFESPKKKRKVSSETGPVAVDPTLRRRIEPHEFEVFFDPRELAAETCLLYEINWGGRHSIWRHTSQNTNKHVEVNFIEKFTTERYFCPNTRCSITWFLSWSPCGECSRAITEFLSRYPHVTLFIYIARLYHHADPRNRQGLRDLISSGVTIQIMTEQESGYCWRNFVNYSPSNEAHWPRYPHLWVRLYVLELYCIILGLPPCLNILRRKQPQLTFFTIALQSCHYQRLPPHILWATGLKSGGSSGGSSGSETPGTSESATPESSGGSSGGSDKKYSIGLAIGTNSVGWAVITDEYKVPSKKFKVLGNTDRHSIKKNLIGALLFDSGETAEATRLKRTARRRYTRRKNRICYLQEIFSNEMAKVDDSFFHRLEESFLVEEDKKHERHPIFGNIVDEVAYHEKYPTIYHLRKKLVDSTDKADLRLIYLALAHMIKFRGHFLIEGDLNPDNSDVDKLFIQLVQTYNQLFEENPINASGVDAKAILSARLSKSRRLENLIAQLPGEKKNGLFGNLIALSLGLTPNFKSNFDLAEDAKLQLSKDTYDDDLDNLLAQIGDQYADLFLAAKNLSDAILLSDILRVNTEITKAPLSASMIKRYDEHHQDLTLLKALVRQQLPEKYKEIFFDQSKNGYAGYIDGGASQEEFYKFIKPILEKMDGTEELLVKLNREDLLRKQRTFDNGSIPHQIHLGELHAILRRQEDFYPFLKDNREKIEKILTFRIPYYVGPLARGNSRFAWMTRKSEETITPWNFEEVVDKGASAQSFIERMTNFDKNLPNEKVLPKHSLLYEYFTVYNELTKVKYVTEGMRKPAFLSGEQKKAIVDLLFKTNRKVTVKQLKEDYFKKIECFDSVEISGVEDRFNASLGTYHDLLKIIKDKDFLDNEENEDILEDIVLTLTLFEDREMIEERLKTYAHLFDDKVMKQLKRRRYTGWGRLSRKLINGIRDKQSGKTILDFLKSDGFANRNFMQLIHDDSLTFKEDIQKAQVSGQGDSLHEHIANLAGSPAIKKGILQTVKVVDELVKVMGRHKPENIVIEMARENQTTQKGQKNSRERMKRIEEGIKELGSQILKEHPVENTQLQNEKLYLYYLQNGRDMYVDQELDINRLSDYDVDHIVPQSFLKDDSIDNKVLTRSDKNRGKSDNVPSEEVVKKMKNYWRQLLNAKLITQRKFDNLTKAERGGLSELDKAGFIKRQLVETRQITKHVAQILDSRMNTKYDENDKLIREVKVITLKSKLVSDFRKDFQFYKVREINNYHHAHDAYLNAVVGTALIKKYPKLESEFVYGDYKVYDVRKMIAKSEQEIGKATAKYFFYSNIMNFFKTEITLANGEIRKRPLIETNGETGEIVWDKGRDFATVRKVLSMPQVNIVKKTEVQTGGFSKESIRPKRNSDKLIARKKDWDPKKYGGFVSPTVAYSVLVVAKVEKGKSKKLKSVKELLGITIMERSSFEKNPIDFLEAKGYKEVKKDLIIKLPKYSLFELENGRKRMLASARFLQKGNELALPSKYVNFLYLASHYEKLKGSPEDNEQKQLFVEQHKHYLDEIIEQISEFSKRVILADANLDKVLSAYNKHRDKPIREQAENIIHLFTLTNLGAPRAFKYFDTTIDRKVYRSTKEVLDATLIHQSITGLYETRIDLSQLGGDSGGSGGSGGSTNLSDIIEKETGKQLVIQESILMLPEEVEEVIGNKPESDILVHTAYDESTDENVMLLTSDAPEYKPWALVIQDSNGENKIKMLSGGSGGSGGSTNLSDIIEKETGKQLVIQESILMLPEEVEEVIGNKPESDILVHTAYDESTDENVMLLTSDAPEYKPWALVIQDSNGENKIKMLSGGSKRTADGSEFEPKKKRKV

SEQ ID NO: 244 - protein, 1874 aa, Artificial Sequence
  Synthetic
MKRTADGSEFESPKKKRKVSSETGPVAVDPTLRRRIEPHEFEVFFDPRELRKETCLLYEINWGGRHSIWRHTSQNTNKHVEVNFIEKFTTERYFCPNTRCSITWFLSYSPCGECSRAITEFLSRYPHVTLFIYIARLYHHADPENRQGLRDLISSGVTIQIMTEQESGYCWRNFVNYSPSNEAHWPRYPHLWVRLYVLELYCIILGLPPCLNILRRKQPQLTFFTIALQSCHYQRLPPHILWATGLKSGGSSGGSSGSETPGTSESATPESSGGSSGGSEIGKATAKYFFYSNIMNFFKTEITLANGEIRKRPLIETNGETGEIVWDKGRDFATVRKVLSMPQVNIVKKTEVQTGGFSKESILPKRNSDKLIARKKDWDPKKYGGFDSPTVAYSVLVVAKVEKGKSKKLKSVKELLGITIMERSSFEKNPIDFLEAKGYKEVKKDLIIKLPKYSLFELENGRKRMLASAGELQKGNELALPSKYVNFLYLASHYEKLKGSPEDNEQKQLFVEQHKHYLDEIIEQISEFSKRVILADANLDKVLSAYNKHRDKPIREQAENIIHLFTLTNLGAPAAFKYFDTTIDRKRYTSTKEVLDATLIHQSITGLYETRIDLSQLGGDGGSGGSGGSGGSGGSGGSGGMDKKYSIGLAIGTNSVGWAVITDEYKVPSKKFKVLGNTDRHSIKKNLIGALLFDSGETAEATRLKRTARRRYTRRKNRICYLQEIFSNEMAKVDDSFFHRLEESFLVEEDKKHERHPIFGNIVDEVAYHEKYPTIYHLRKKLVDSTDKADLRLIYLALAHMIKFRGHFLIEGDLNPDNSDVDKLFIQLVQTYNQLFEENPINASGVDAKAILSARLSKSRRLENLIAQLPGEKKNGLFGNLIALSLGLTPNFKSNFDLAEDAKLQLSKDTYDDDLDNLLAQIGDQYADLFLAAKNLSDAILLSDILRVNTEITKAPLSASMIKRYDEHHQDLTLLKALVRQQLPEKYKEIFFDQSKNGYAGYIDGGASQEEFYKFIKPILEKMDGTEELLVKLNREDLLRKQRTFDNGSIPHQIHLGELHAILRRQEDFYPFLKDNREKIEKILTFRIPYYVGPLARGNSRFAWMTRKSEETITPWNFEEVVDKGASAQSFIERMTNFDKNLPNEKVLPKHSLLYEYFTVYNELTKVKYVTEGMRKPAFLSGEQKKAIVDLLFKTNRKVTVKQLKEDYFKKIECFDSVEISGVEDRFNASLGTYHDLLKIIKDKDFLDNEENEDILEDIVLTLTLFEDREMIEERLKTYAHLFDDKVMKQLKRRRYTGWGRLSRKLINGIRDKQSGKTILDFLKSDGFANRNFMQLIHDDSLTFKEDIQKAQVSGQGDSLHEHIANLAGSPAIKKGILQTVKVVDELVKVMGRHKPENIVIEMARENQTTQKGQKNSRERMKRIEEGIKELGSQILKEHPVENTQLQNEKLYLYYLQNGRDMYVDQELDINRLSDYDVDHIVPQSFLKDDSIDNKVLTRSDKNRGKSDNVPSEEVVKKMKNYWRQLLNAKLITQRKFDNLTKAERGGLSELDKAGFIKRQLVETRQITKHVAQILDSRMNTKYDENDKLIREVKVITLKSKLVSDFRKDFQFYKVREINNYHHAHDAYLNAVVGTALIKKYPKLESEFVYGDYKVYDVRKMIAKSEQSGGSGGSGGSTNLSDIIEKETGKQLVIQESILMLPEEVEEVIGNKPESDILVHTAYDESTDENVMLLTSDAPEYKPWALVIQDSNGENKIKMLSGGSGGSGGSTNLSDIIEKETGKQLVIQESILMLPEEVEEVIGNKPESDILVHTAYDESTDENVMLLTSDAPEYKPWALVIQDSNGENKIKMLSGGSKRTADGSEFEPKKKRKV

SEQ ID NO: 245 - protein, 1874 aa, Artificial Sequence
  Synthetic
MKRTADGSEFESPKKKRKVSSETGPVAVDPTLRRRIEPHEFEVFFDPRELRKETCLLYEINWGGRHSIWRHTSQNTNKHVEVNFIEKFTTERYFCPNTRCSITWFLSYSPCGECSRAITEFLSRYPHVTLFIYIARLYHHADPRNRQGLEDLISSGVTIQIMTEQESGYCWRNFVNYSPSNEAHWPRYPHLWVRLYVLELYCIILGLPPCLNILRRKQPQLTFFTIALQSCHYQRLPPHILWATGLKSGGSSGGSSGSETPGTSESATPESSGGSSGGSEIGKATAKYFFYSNIMNFFKTEITLANGEIRKRPLIETNGETGEIVWDKGRDFATVRKVLSMPQVNIVKKTEVQTGGFSKESILPKRNSDKLIARKKDWDPKKYGGFDSPTVAYSVLVVAKVEKGKSKKLKSVKELLGITIMERSSFEKNPIDFLEAKGYKEVKKDLIIKLPKYSLFELENGRKRMLASAGELQKGNELALPSKYVNFLYLASHYEKLKGSPEDNEQKQLFVEQHKHYLDEIIEQISEFSKRVILADANLDKVLSAYNKHRDKPIREQAENIIHLFTLTNLGAPAAFKYFDTTIDRKRYTSTKEVLDATLIHQSITGLYETRIDLSQLGGDGGSGGSGGSGGSGGSGGSGGMDKKYSIGLAIGTNSVGWAVITDEYKVPSKKFKVLGNTDRHSIKKNLIGALLFDSGETAEATRLKRTARRRYTRRKNRICYLQEIFSNEMAKVDDSFFHRLEESFLVEEDKKHERHPIFGNIVDEVAYHEKYPTIYHLRKKLVDSTDKADLRLIYLALAHMIKFRGHFLIEGDLNPDNSDVDKLFIQLVQTYNQLFEENPINASGVDAKAILSARLSKSRRLENLIAQLPGEKKNGLFGNLIALSLGLTPNFKSNFDLAEDAKLQLSKDTYDDDLDNLLAQIGDQYADLFLAAKNLSDAILLSDILRVNTEITKAPLSASMIKRYDEHHQDLTLLKALVRQQLPEKYKEIFFDQSKNGYAGYIDGGASQEEFYKFIKPILEKMDGTEELLVKLNREDLLRKQRTFDNGSIPHQIHLGELHAILRRQEDFYPFLKDNREKIEKILTFRIPYYVGPLARGNSRFAWMTRKSEETITPWNFEEVVDKGASAQSFIERMTNFDKNLPNEKVLPKHSLLYEYFTVYNELTKVKYVTEGMRKPAFLSGEQKKAIVDLLFKTNRKVTVKQLKEDYFKKIECFDSVEISGVEDRFNASLGTYHDLLKIIKDKDFLDNEENEDILEDIVLTLTLFEDREMIEERLKTYAHLFDDKVMKQLKRRRYTGWGRLSRKLINGIRDKQSGKTILDFLKSDGFANRNFMQLIHDDSLTFKEDIQKAQVSGQGDSLHEHIANLAGSPAIKKGILQTVKVVDELVKVMGRHKPENIVIEMARENQTTQKGQKNSRERMKRIEEGIKELGSQILKEHPVENTQLQNEKLYLYYLQNGRDMYVDQELDINRLSDYDVDHIVPQSFLKDDSIDNKVLTRSDKNRGKSDNVPSEEVVKKMKNYWRQLLNAKLITQRKFDNLTKAERGGLSELDKAGFIKRQLVETRQITKHVAQILDSRMNTKYDENDKLIREVKVITLKSKLVSDFRKDFQFYKVREINNYHHAHDAYLNAVVGTALIKKYPKLESEFVYGDYKVYDVRKMIAKSEQSGGSGGSGGSTNLSDIIEKETGKQLVIQESILMLPEEVEEVIGNKPESDILVHTAYDESTDENVMLLTSDAPEYKPWALVIQDSNGENKIKMLSGGSGGSGGSTNLSDIIEKETGKQLVIQESILMLPEEVEEVIGNKPESDILVHTAYDESTDENVMLLTSDAPEYKPWALVIQDSNGENKIKMLSGGSKRTADGSEFEPKKKRKV

SEQ ID NO: 246 - protein, 1874 aa, Artificial Sequence
  Synthetic
MKRTADGSEFESPKKKRKVSSETGPVAVDPTLRRRIEPHEFEVFFDPRELRKETCLLYEINWGGRHSIWRHTSQNTNKHVEVNFIEKFTTERYFCPNTRCSITWFLSYSPCGECSRAITEFLSRYPHVTLFIYIARLYHHADPENRQGLEDLISSGVTIQIMTEQESGYCWRNFVNYSPSNEAHWPRYPHLWVRLYVLELYCIILGLPPCLNILRRKQPQLTFFTIALQSCHYQRLPPHILWATGLKSGGSSGGSSGSETPGTSESATPESSGGSSGGSEIGKATAKYFFYSNIMNFFKTEITLANGEIRKRPLIETNGETGEIVWDKGRDFATVRKVLSMPQVNIVKKTEVQTGGFSKESILPKRNSDKLIARKKDWDPKKYGGFDSPTVAYSVLVVAKVEKGKSKKLKSVKELLGITIMERSSFEKNPIDFLEAKGYKEVKKDLIIKLPKYSLFELENGRKRMLASAGELQKGNELALPSKYVNFLYLASHYEKLKGSPEDNEQKQLFVEQHKHYLDEIIEQISEFSKRVILADANLDKVLSAYNKHRDKPIREQAENIIHLFTLTNLGAPAAFKYFDTTIDRKRYTSTKEVLDATLIHQSITGLYETRIDLSQLGGDGGSGGSGGSGGSGGSGGSGGMDKKYSIGLAIGTNSVGWAVITDEYKVPSKKFKVLGNTDRHSIKKNLIGALLFDSGETAEATRLKRTARRRYTRRKNRICYLQEIFSNEMAKVDDSFFHRLEESFLVEEDKKHERHPIFGNIVDEVAYHEKYPTIYHLRKKLVDSTDKADLRLIYLALAHMIKFRGHFLIEGDLNPDNSDVDKLFIQLVQTYNQLFEENPINASGVDAKAILSARLSKSRRLENLIAQLPGEKKNGLFGNLIALSLGLTPNFKSNFDLAEDAKLQLSKDTYDDDLDNLLAQIGDQYADLFLAAKNLSDAILLSDILRVNTEITKAPLSASMIKRYDEHHQDLTLLKALVRQQLPEKYKEIFFDQSKNGYAGYIDGGASQEEFYKFIKPILEKMDGTEELLVKLNREDLLRKQRTFDNGSIPHQIHLGELHAILRRQEDFYPFLKDNREKIEKILTFRIPYYVGPLARGNSRFAWMTRKSEETITPWNFEEVVDKGASAQSFIERMTNFDKNLPNEKVLPKHSLLYEYFTVYNELTKVKYVTEGMRKPAFLSGEQKKAIVDLLFKTNRKVTVKQLKEDYFKKIECFDSVEISGVEDRFNASLGTYHDLLKIIKDKDFLDNEENEDILEDIVLTLTLFEDREMIEERLKTYAHLFDDKVMKQLKRRRYTGWGRLSRKLINGIRDKQSGKTILDFLKSDGFANRNFMQLIHDDSLTFKEDIQKAQVSGQGDSLHEHIANLAGSPAIKKGILQTVKVVDELVKVMGRHKPENIVIEMARENQTTQKGQKNSRERMKRIEEGIKELGSQILKEHPVENTQLQNEKLYLYYLQNGRDMYVDQELDINRLSDYDVDHIVPQSFLKDDSIDNKVLTRSDKNRGKSDNVPSEEVVKKMKNYWRQLLNAKLITQRKFDNLTKAERGGLSELDKAGFIKRQLVETRQITKHVAQILDSRMNTKYDENDKLIREVKVITLKSKLVSDFRKDFQFYKVREINNYHHAHDAYLNAVVGTALIKKYPKLESEFVYGDYKVYDVRKMIAKSEQSGGSGGSGGSTNLSDIIEKETGKQLVIQESILMLPEEVEEVIGNKPESDILVHTAYDESTDENVMLLTSDAPEYKPWALVIQDSNGENKIKMLSGGSGGSGGSTNLSDIIEKETGKQLVIQESILMLPEEVEEVIGNKPESDILVHTAYDESTDENVMLLTSDAPEYKPWALVIQDSNGENKIKMLSGGSKRTADGSEFEPKKKRKV

SEQ ID NO: 247 - protein, 1874 aa, Artificial Sequence
  Synthetic
MKRTADGSEFESPKKKRKVSSETGPVAVDPTLRRRIEPHEFEVFFDPRELRKETCLLYEINWGGRHSIWRHTSQNTNKHVEVNFIEKFTTERYFCPNTRCSITWFLSWSPCGECSRAITEFLSRYPHVTLFIYIARLYHHADPENRQGLEDLISSGVTIQIMTEQESGYCWRNFVNYSPSNEAHWPRYPHLWVRLYVLELYCIILGLPPCLNILRRKQPQLTFFTIALQSCHYQRLPPHILWATGLKSGGSSGGSSGSETPGTSESATPESSGGSSGGSEIGKATAKYFFYSNIMNFFKTEITLANGEIRKRPLIETNGETGEIVWDKGRDFATVRKVLSMPQVNIVKKTEVQTGGFSKESILPKRNSDKLIARKKDWDPKKYGGFDSPTVAYSVLVVAKVEKGKSKKLKSVKELLGITIMERSSFEKNPIDFLEAKGYKEVKKDLIIKLPKYSLFELENGRKRMLASAGELQKGNELALPSKYVNFLYLASHYEKLKGSPEDNEQKQLFVEQHKHYLDEIIEQISEFSKRVILADANLDKVLSAYNKHRDKPIREQAENIIHLFTLTNLGAPAAFKYFDTTIDRKRYTSTKEVLDATLIHQSITGLYETRIDLSQLGGDGGSGGSGGSGGSGGSGGSGGMDKKYSIGLAIGTNSVGWAVITDEYKVPSKKFKVLGNTDRHSIKKNLIGALLFDSGETAEATRLKRTARRRYTRRKNRICYLQEIFSNEMAKVDDSFFHRLEESFLVEEDKKHERHPIFGNIVDEVAYHEKYPTIYHLRKKLVDSTDKADLRLIYLALAHMIKFRGHFLIEGDLNPDNSDVDKLFIQLVQTYNQLFEENPINASGVDAKAILSARLSKSRRLENLIAQLPGEKKNGLFGNLIALSLGLTPNFKSNFDLAEDAKLQLSKDTYDDDLDNLLAQIGDQYADLFLAAKNLSDAILLSDILRVNTEITKAPLSASMIKRYDEHHQDLTLLKALVRQQLPEKYKEIFFDQSKNGYAGYIDGGASQEEFYKFIKPILEKMDGTEELLVKLNREDLLRKQRTFDNGSIPHQIHLGELHAILRRQEDFYPFLKDNREKIEKILTFRIPYYVGPLARGNSRFAWMTRKSEETITPWNFEEVVDKGASAQSFIERMTNFDKNLPNEKVLPKHSLLYEYFTVYNELTKVKYVTEGMRKPAFLSGEQKKAIVDLLFKTNRKVTVKQLKEDYFKKIECFDSVEISGVEDRFNASLGTYHDLLKIIKDKDFLDNEENEDILEDIVLTLTLFEDREMIEERLKTYAHLFDDKVMKQLKRRRYTGWGRLSRKLINGIRDKQSGKTILDFLKSDGFANRNFMQLIHDDSLTFKEDIQKAQVSGQGDSLHEHIANLAGSPAIKKGILQTVKVVDELVKVMGRHKPENIVIEMARENQTTQKGQKNSRERMKRIEEGIKELGSQILKEHPVENTQLQNEKLYLYYLQNGRDMYVDQELDINRLSDYDVDHIVPQSFLKDDSIDNKVLTRSDKNRGKSDNVPSEEVVKKMKNYWRQLLNAKLITQRKFDNLTKAERGGLSELDKAGFIKRQLVETRQITKHVAQILDSRMNTKYDENDKLIREVKVITLKSKLVSDFRKDFQFYKVREINNYHHAHDAYLNAVVGTALIKKYPKLESEFVYGDYKVYDVRKMIAKSEQSGGSGGSGGSTNLSDIIEKETGKQLVIQESILMLPEEVEEVIGNKPESDILVHTAYDESTDENVMLLTSDAPEYKPWALVIQDSNGENKIKMLSGGSGGSGGSTNLSDIIEKETGKQLVIQESILMLPEEVEEVIGNKPESDILVHTAYDESTDENVMLLTSDAPEYKPWALVIQDSNGENKIKMLSGGSKRTADGSEFEPKKKRKV

SEQ ID NO: 248 - protein, 1874 aa, Artificial Sequence
  Synthetic
MKRTADGSEFESPKKKRKVSSETGPVAVDPTLRRRIEPHEFEVFFDPRELAAETCLLYEINWGGRHSIWRHTSQNTNKHVEVNFIEKFTTERYFCPNTRCSITWFLSWSPCGECSRAITEFLSRYPHVTLFIYIARLYHHADPRNRQGLRDLISSGVTIQIMTEQESGYCWRNFVNYSPSNEAHWPRYPHLWVRLYVLELYCIILGLPPCLNILRRKQPQLTFFTIALQSCHYQRLPPHILWATGLKSGGSSGGSSGSETPGTSESATPESSGGSSGGSEIGKATAKYFFYSNIMNFFKTEITLANGEIRKRPLIETNGETGEIVWDKGRDFATVRKVLSMPQVNIVKKTEVQTGGFSKESILPKRNSDKLIARKKDWDPKKYGGFDSPTVAYSVLVVAKVEKGKSKKLKSVKELLGITIMERSSFEKNPIDFLEAKGYKEVKKDLIIKLPKYSLFELENGRKRMLASAGELQKGNELALPSKYVNFLYLASHYEKLKGSPEDNEQKQLFVEQHKHYLDEIIEQISEFSKRVILADANLDKVLSAYNKHRDKPIREQAENIIHLFTLTNLGAPAAFKYFDTTIDRKRYTSTKEVLDATLIHQSITGLYETRIDLSQLGGDGGSGGSGGSGGSGGSGGSGGMDKKYSIGLAIGTNSVGWAVITDEYKVPSKKFKVLGNTDRHSIKKNLIGALLFDSGETAEATRLKRTARRRYTRRKNRICYLQEIFSNEMAKVDDSFFHRLEESFLVEEDKKHERHPIFGNIVDEVAYHEKYPTIYHLRKKLVDSTDKADLRLIYLALAHMIKFRGHFLIEGDLNPDNSDVDKLFIQLVQTYNQLFEENPINASGVDAKAILSARLSKSRRLENLIAQLPGEKKNGLFGNLIALSLGLTPNFKSNFDLAEDAKLQLSKDTYDDDLDNLLAQIGDQYADLFLAAKNLSDAILLSDILRVNTEITKAPLSASMIKRYDEHHQDLTLLKALVRQQLPEKYKEIFFDQSKNGYAGYIDGGASQEEFYKFIKPILEKMDGTEELLVKLNREDLLRKQRTFDNGSIPHQIHLGELHAILRRQEDFYPFLKDNREKIEKILTFRIPYYVGPLARGNSRFAWMTRKSEETITPWNFEEVVDKGASAQSFIERMTNFDKNLPNEKVLPKHSLLYEYFTVYNELTKVKYVTEGMRKPAFLSGEQKKAIVDLLFKTNRKVTVKQLKEDYFKKIECFDSVEISGVEDRFNASLGTYHDLLKIIKDKDFLDNEENEDILEDIVLTLTLFEDREMIEERLKTYAHLFDDKVMKQLKRRRYTGWGRLSRKLINGIRDKQSGKTILDFLKSDGFANRNFMQLIHDDSLTFKEDIQKAQVSGQGDSLHEHIANLAGSPAIKKGILQTVKVVDELVKVMGRHKPENIVIEMARENQTTQKGQKNSRERMKRIEEGIKELGSQILKEHPVENTQLQNEKLYLYYLQNGRDMYVDQELDINRLSDYDVDHIVPQSFLKDDSIDNKVLTRSDKNRGKSDNVPSEEVVKKMKNYWRQLLNAKLITQRKFDNLTKAERGGLSELDKAGFIKRQLVETRQITKHVAQILDSRMNTKYDENDKLIREVKVITLKSKLVSDFRKDFQFYKVREINNYHHAHDAYLNAVVGTALIKKYPKLESEFVYGDYKVYDVRKMIAKSEQSGGSGGSGGSTNLSDIIEKETGKQLVIQESILMLPEEVEEVIGNKPESDILVHTAYDESTDENVMLLTSDAPEYKPWALVIQDSNGENKIKMLSGGSGGSGGSTNLSDIIEKETGKQLVIQESILMLPEEVEEVIGNKPESDILVHTAYDESTDENVMLLTSDAPEYKPWALVIQDSNGENKIKMLSGGSKRTADGSEFEPKKKRKV

SEQ ID NO: 249 - DNA, 51 bp, Artificial Sequence
  Synthetic
ggtttcagacaaaatcaaaaagaaggaaggtgctcacattccttaaattaa

SEQ ID NO: 250 - RNA, 20 nt, Artificial Sequence
  Synthetic
auuuugucuaaaacccugua

SEQ ID NO: 251 - DNA, 51 bp, Artificial Sequence
  Synthetic
ggttttagacaaaatcaaaaagaaggaaggtgctcacattccttaaattaa

SEQ ID NO: 252 - DNA, 20 bp, Artificial Sequence
  Synthetic
attttccttacagggtttta

SEQ ID NO: 253 - DNA, 20 bp, Artificial Sequence
  Synthetic
tttccttacagggttttaga

SEQ ID NO: 254 - DNA, 20 bp, Artificial Sequence
  Synthetic
ttccttacagggttttagac

SEQ ID NO: 255 - DNA, 20 bp, Artificial Sequence
  Synthetic
tccttacagggttttagaca

SEQ ID NO: 256 - DNA, 20 bp, Artificial Sequence
  Synthetic
ccttacagggttttagacaa

SEQ ID NO: 257 - DNA, 20 bp, Artificial Sequence
  Synthetic
cttacagggttttagacaaa

SEQ ID NO: 258 - DNA, 20 bp, Artificial Sequence
  Synthetic
ttacagggttttagacaaaa

SEQ ID NO: 259 - DNA, 20 bp, Artificial Sequence
  Synthetic
tacagggttttagacaaaat

SEQ ID NO: 260 - DNA, 20 bp, Artificial Sequence
  Synthetic
acagggttttagacaaaatc

SEQ ID NO: 261 - DNA, 15 bp, Artificial Sequence
  Synthetic
gttttagacaaaatc

SEQ ID NO: 262 - DNA, 17 bp, Artificial Sequence
  Synthetic
ggttttagacaaaatca

SEQ ID NO: 263 - DNA, 19 bp, Artificial Sequence
  Synthetic
gggttttagacaaaatcaa

SEQ ID NO: 264 - DNA, 21 bp, Artificial Sequence
  Synthetic
agggttttagacaaaatcaaa

SEQ ID NO: 265 - DNA, 23 bp, Artificial Sequence
  Synthetic
cagggttttagacaaaatcaaaa

SEQ ID NO: 266 - DNA, 24 bp, Artificial Sequence
  Synthetic
acagggttttagacaaaatcaaaa

SEQ ID NO: 267 - DNA, 19 bp, Artificial Sequence
  Synthetic
catagagcagcactaaatg

SEQ ID NO: 268 - DNA, 19 bp, Artificial Sequence
  Synthetic
atagagcagcactaaatga

SEQ ID NO: 269 - DNA, 19 bp, Artificial Sequence
  Synthetic
tagagcagcactaaatgac

SEQ ID NO: 270 - DNA, 19 bp, Artificial Sequence
  Synthetic
agagcagcactaaatgaca

SEQ ID NO: 271 - DNA, 19 bp, Artificial Sequence
  Synthetic
gagcagcactaaatgacac

SEQ ID NO: 272 - DNA, 19 bp, Artificial Sequence
  Synthetic
agcagcactaaatgacacc

SEQ ID NO: 273 - DNA, 19 bp, Artificial Sequence
  Synthetic
gcagcactaaatgacacca

SEQ ID NO: 274 - DNA, 19 bp, Artificial Sequence
  Synthetic
cagcactaaatgacaccat

SEQ ID NO: 275 - DNA, 19 bp, Artificial Sequence
  Synthetic
agcactaaatgacaccata

SEQ ID NO: 276 - DNA, 19 bp, Artificial Sequence
  Synthetic
gcactaaatgacaccataa

SEQ ID NO: 277 - DNA, 15 bp, Artificial Sequence
  Synthetic
taaatgacaccataa

SEQ ID NO: 278 - DNA, 17 bp, Artificial Sequence
  Synthetic
ctaaatgacaccataaa

SEQ ID NO: 279 - DNA, 19 bp, Artificial Sequence
  Synthetic
actaaatgacaccataaag

SEQ ID NO: 280 - DNA, 21 bp, Artificial Sequence
  Synthetic
cactaaatgacaccataaaga

SEQ ID NO: 281 - DNA, 23 bp, Artificial Sequence
  Synthetic
gcactaaatgacaccataaagaa

SEQ ID NO: 282 - DNA, 25 bp, Artificial Sequence
  Synthetic
agcactaaatgacaccataaagaaa

SEQ ID NO: 283 - DNA, 20 bp, Artificial Sequence
  Synthetic
aatttcatggtacatgagtg

SEQ ID NO: 284 - DNA, 20 bp, Artificial Sequence
  Synthetic
tttcatggtacatgagtggc

SEQ ID NO: 285 - DNA, 20 bp, Artificial Sequence
  Synthetic
ttcatggtacatgagtggct

SEQ ID NO: 286 - DNA, 20 bp, Artificial Sequence
  Synthetic
tcatggtacatgagtggcta

SEQ ID NO: 287 - DNA, 20 bp, Artificial Sequence
  Synthetic
catggtacatgagtggctat

SEQ ID NO: 288 - DNA, 20 bp, Artificial Sequence
  Synthetic
atggtacatgagtggctatc

SEQ ID NO: 289 - DNA, 20 bp, Artificial Sequence
  Synthetic
tggtacatgagtggctatca

SEQ ID NO: 290 - DNA, 20 bp, Artificial Sequence
  Synthetic
ggtacatgagtggctatcat

SEQ ID NO: 291 - DNA, 20 bp, Artificial Sequence
  Synthetic
gtacatgagtggctatcata

SEQ ID NO: 292 - DNA, 15 bp, Artificial Sequence
  Synthetic
tgagtggctatcata

SEQ ID NO: 293 - DNA, 17 bp, Artificial Sequence
  Synthetic
atgagtggctatcatac

SEQ ID NO: 294 - DNA, 19 bp, Artificial Sequence
  Synthetic
catgagtggctatcatact

SEQ ID NO: 295 - DNA, 21 bp, Artificial Sequence
  Synthetic
acatgagtggctatcatactg

SEQ ID NO: 296 - DNA, 23 bp, Artificial Sequence
  Synthetic
tacatgagtggctatcatactgg

SEQ ID NO: 297 - DNA, 125 bp, Artificial Sequence
  Synthetic
  misc_feature (1)..(8): n is a, c, g, or t
nnnnnnnngtttttgtactctcaagatttagaaataaatcttgcagaagctacaaagataaggcttcatgccgaaatcaacaccctgtcattttatggcagggtgttttcgttatttaatttttt

SEQ ID NO: 298 - DNA, 121 bp, Artificial Sequence
  Synthetic
  misc_feature (1)..(18): n is a, c, g, or t
nnnnnnnnnnnnnnnnnngtttttgtactctcagaaatgcagaagctacaaagataaggcttcatgccgaaatcaacaccctgtcattttatggcagggtgttttcgttatttaatttttt

SEQ ID NO: 299 - DNA, 109 bp, Artificial Sequence
  Synthetic
  misc_feature (1)..(20): n is a, c, g, or t
nnnnnnnnnnnnnnnnnnnngtttttgtactctcagaaatgcagaagctacaaagataaggcttcatgccgaaatcaacaccctgtcattttatggcagggtgtttttt

SEQ ID NO: 300 - DNA, 102 bp, Artificial Sequence
  Synthetic
  misc_feature (1)..(20): n is a, c, g, or t
nnnnnnnnnnnnnnnnnnnngttttagagctagaaatagcaagttaaaataaggctagtccgttatcaacttgaaaaagtggcaccgagtcggtgctttttt

SEQ ID NO: 301 - DNA, 88 bp, Artificial Sequence
  Synthetic
  misc_feature (1)..(20): n is a, c, g, or t
nnnnnnnnnnnnnnnnnnnngttttagagctagaaatagcaagttaaaataaggctagtccgttatcaacttgaaaaagtgttttttt

SEQ ID NO: 302 - DNA, 76 bp, Artificial Sequence
  Synthetic
  misc_feature (1)..(20): n is a, c, g, or t
nnnnnnnnnnnnnnnnnnnngttttagagctagaaatagcaagttaaaataaggctagtccgttatcatttttttt

SEQ ID NO: 303 - RNA, 82 nt, Artificial Sequence
  Synthetic
guuuuagagcuagaaauagcaaguuaaaauaaaggcuaguccguuaucaacuugaaaaaguggcaccgagucggugcuuuuu

SEQ ID NO: 304 - RNA, 83 nt, Artificial Sequence
  Synthetic
guuuuagagcuagaaauagcaaguuaaaauaaggcuaguccguuaucaacuugaaaaaguggcaccgagucggugcuuuuuuu

SEQ ID NO: 305 - RNA, 103 nt, Artificial Sequence
  Synthetic
gguccacccaccugggcuccguuuuagagcuagaaauagcaaguuaaaauaaggcuaguccguuaucaacuugaaaaaguggcaccgagucggugcuuuuuuu

SEQ ID NO: 306 - RNA, 26 nt, Artificial Sequence
  Synthetic
uuuuugauuuugucuaaaacccugua

SEQ ID NO: 307 - RNA, 25 nt, Artificial Sequence
  Synthetic
uuuugauuuugucuaaaacccugua

SEQ ID NO: 308 - RNA, 24 nt, Artificial Sequence
  Synthetic
uuugauuuugucuaaaacccugua

SEQ ID NO: 309 - RNA, 23 nt, Artificial Sequence
  Synthetic
uugauuuugucuaaaacccugua

SEQ ID NO: 310 - RNA, 22 nt, Artificial Sequence
  Synthetic
ugauuuugucuaaaacccugua

SEQ ID NO: 311 - RNA, 21 nt, Artificial Sequence
  Synthetic
gauuuugucuaaaacccugua

SEQ ID NO: 312 - RNA, 20 nt, Artificial Sequence
  Synthetic
auuuugucuaaaacccugua

SEQ ID NO: 313 - RNA, 19 nt, Artificial Sequence
  Synthetic
uuuugucuaaaacccugua

SEQ ID NO: 314 - RNA, 18 nt, Artificial Sequence
  Synthetic
uuugucuaaaacccugua

SEQ ID NO: 315 - RNA, 17 nt, Artificial Sequence
  Synthetic
uugucuaaaacccugua

SEQ ID NO: 316 - RNA, 16 nt, Artificial Sequence
  Synthetic
ugucuaaaacccugua

SEQ ID NO: 317 - RNA, 20 nt, Artificial Sequence
  Synthetic
uuugucuaaaacccuguaag

SEQ ID NO: 318 - RNA, 20 nt, Artificial Sequence
  Synthetic
uuuugucuaaaacccuguaa

SEQ ID NO: 319 - RNA, 18 nt, Artificial Sequence
  Synthetic
ugauuuugucuaaaaccc

SEQ ID NO: 320 - RNA, 18 nt, Artificial Sequence
  Synthetic
gauuuugucuaaaacccu

SEQ ID NO: 321 - RNA, 18 nt, Artificial Sequence
  Synthetic
auuuugucuaaaacccug

SEQ ID NO: 322 - RNA, 18 nt, Artificial Sequence
  Synthetic
gucuaaaacccuguaagg

SEQ ID NO: 323 - RNA, 18 nt, Artificial Sequence
  Synthetic
ucuaaaacccuguaagga

SEQ ID NO: 324 - RNA, 20 nt, Artificial Sequence
  Synthetic
uuugcaggaaaugcuggcau

SEQ ID NO: 325 - RNA, 20 nt, Artificial Sequence
  Synthetic
uucucauuugcaggaaaugc

SEQ ID NO: 326 - RNA, 20 nt, Artificial Sequence
  Synthetic
cauuuagugcugcucuaugc

SEQ ID NO: 327 - RNA, 20 nt, Artificial Sequence
  Synthetic
caggaaaugcuggcauagag

SEQ ID NO: 328 - RNA, 20 nt, Artificial Sequence
  Synthetic
uugcaggaaaugcuggcaua

SEQ ID NO: 329 - RNA, 20 nt, Artificial Sequence
  Synthetic
auuugcaggaaaugcuggca

SEQ ID NO: 330 - RNA, 20 nt, Artificial Sequence
  Synthetic
uacaugaguggcuaucauac

SEQ ID NO: 331 - DNA, 20 bp, Artificial Sequence
  Synthetic
attttgtctaaaaccctgta

SEQ ID NO: 332 - RNA, 20 nt, Artificial Sequence
  Synthetic
auuuugucuaaaacccugua

SEQ ID NO: 333 - DNA, 20 bp, Artificial Sequence
  Synthetic
tttgtctaaaaccctgtaag

SEQ ID NO: 334 - DNA, 20 bp, Artificial Sequence
  Synthetic
ttttgtctaaaaccctgtaa

SEQ ID NO: 335 - DNA, 18 bp, Artificial Sequence
  Synthetic
tgattttgtctaaaaccc

SEQ ID NO: 336 - DNA, 18 bp, Artificial Sequence
  Synthetic
gattttgtctaaaaccct

SEQ ID NO: 337 - DNA, 18 bp, Artificial Sequence
  Synthetic
attttgtctaaaaccctg

SEQ ID NO: 338 - DNA, 18 bp, Artificial Sequence
  Synthetic
gtctaaaaccctgtaagg

SEQ ID NO: 339 - DNA, 18 bp, Artificial Sequence
  Synthetic
tctaaaaccctgtaagga

SEQ ID NO: 340 - RNA, 20 nt, Artificial Sequence
  Synthetic
uuugucuaaaacccuguaag

SEQ ID NO: 341 - RNA, 20 nt, Artificial Sequence
  Synthetic
uuuugucuaaaacccuguaa

SEQ ID NO: 342 - RNA, 18 nt, Artificial Sequence
  Synthetic
ugauuuugucuaaaaccc

SEQ ID NO: 343 - RNA, 18 nt, Artificial Sequence
  Synthetic
gauuuugucuaaaacccu

SEQ ID NO: 344 - RNA, 18 nt, Artificial Sequence
  Synthetic
auuuugucuaaaacccug

SEQ ID NO: 345 - RNA, 18 nt, Artificial Sequence
  Synthetic
gucuaaaacccuguaagg

SEQ ID NO: 346 - RNA, 18 nt, Artificial Sequence
  Synthetic
ucuaaaacccuguaagga

SEQ ID NO: 347 - DNA, 20 bp, Artificial Sequence
  Synthetic
tttgcaggaaatgctggcat

SEQ ID NO: 348 - DNA, 20 bp, Artificial Sequence
  Synthetic
ttctcatttgcaggaaatgc

SEQ ID NO: 349 - DNA, 20 bp, Artificial Sequence
  Synthetic
catttagtgctgctctatgc

SEQ ID NO: 350 - DNA, 20 bp, Artificial Sequence
  Synthetic
caggaaatgctggcatagag

SEQ ID NO: 351 - DNA, 20 bp, Artificial Sequence
  Synthetic
ttgcaggaaatgctggcata

SEQ ID NO: 352 - DNA, 20 bp, Artificial Sequence
  Synthetic
atttgcaggaaatgctggca

SEQ ID NO: 353 - DNA, 20 bp, Artificial Sequence
  Synthetic
tggcatagagcagcactaaa

SEQ ID NO: 354 - RNA, 20 nt, Artificial Sequence
  Synthetic
uuugcaggaaaugcuggcau

SEQ ID NO: 355 - RNA, 20 nt, Artificial Sequence
  Synthetic
uucucauuugcaggaaaugc

SEQ ID NO: 356 - RNA, 20 nt, Artificial Sequence
  Synthetic
cauuuagugcugcucuaugc

SEQ ID NO: 357 - RNA, 20 nt, Artificial Sequence
  Synthetic
caggaaaugcuggcauagag

SEQ ID NO: 358 - RNA, 20 nt, Artificial Sequence
  Synthetic
uugcaggaaaugcuggcaua

SEQ ID NO: 359 - RNA, 20 nt, Artificial Sequence
  Synthetic
auuugcaggaaaugcuggca

SEQ ID NO: 360 - RNA, 20 nt, Artificial Sequence
  Synthetic
uggcauagagcagcacuaaa

SEQ ID NO: 361 - DNA, 20 bp, Artificial Sequence
  Synthetic
tggcatagagcagcactaaa

SEQ ID NO: 362 - RNA, 20 nt, Artificial Sequence
  Synthetic
uggcauagagcagcacuaaa

SEQ ID NO: 363 - DNA, 251 bp, Artificial Sequence
  Synthetic
gtgaaacaaaatgctttttaacatccatataaagctatctatatatagctatctatatctatatagctattttttttaacttcctttattttccttacagggttttagacaaaatcaaaaagaaggaaggtgctcacattccttaaattaaggagtaagtctgccagcattatgaaagtgaatcttacttttgtaaaactttatggtttgtggaaaacaaatgtttttgaacatttaaaaagttcagatgt

SEQ ID NO: 364 - DNA, 20 bp, Artificial Sequence
  Synthetic
attttgtctaaaaccctgta

SEQ ID NO: 365 - RNA, 20 nt, Artificial Sequence
  Synthetic
auuuugucuaaaacccugua

SEQ ID NO: 366 - DNA, 20 bp, Artificial Sequence
  Synthetic
tttgtctaaaaccctgtaag

SEQ ID NO: 367 - RNA, 20 nt, Artificial Sequence
  Synthetic
uuugucuaaaacccuguaag

SEQ ID NO: 368 - DNA, 20 bp, Artificial Sequence
  Synthetic
ttttgtctaaaaccctgtaa

SEQ ID NO: 369 - RNA, 20 nt, Artificial Sequence
  Synthetic
uuuugucuaaaacccuguaa

SEQ ID NO: 370 - DNA, 18 bp, Artificial Sequence
  Synthetic
tgattttgtctaaaaccc

SEQ ID NO: 371 - RNA, 18 nt, Artificial Sequence
  Synthetic
ugauuuugucuaaaaccc

SEQ ID NO: 372 - DNA, 18 bp, Artificial Sequence
  Synthetic
gattttgtctaaaaccct

SEQ ID NO: 373 - RNA, 18 nt, Artificial Sequence
  Synthetic
gauuuugucuaaaacccu

SEQ ID NO: 374 - DNA, 18 bp, Artificial Sequence
  Synthetic
attttgtctaaaaccctg

SEQ ID NO: 375 - RNA, 18 nt, Artificial Sequence
  Synthetic
auuuugucuaaaacccug

SEQ ID NO: 376 - DNA, 18 bp, Artificial Sequence
  Synthetic
gtctaaaaccctgtaagg

SEQ ID NO: 377 - RNA, 18 nt, Artificial Sequence
  Synthetic
gucuaaaacccuguaagg

SEQ ID NO: 378 - DNA, 18 bp, Artificial Sequence
  Synthetic
tctaaaaccctgtaagga

SEQ ID NO: 379 - RNA, 18 nt, Artificial Sequence
  Synthetic
ucuaaaacccuguaagga

SEQ ID NO: 380 - DNA, 76 bp, Artificial Sequence
  Synthetic
ctctggttctaatttctcatttgcaggaaatgctggcatagagcagcactaaatgacaccactaaagaaacgatca

SEQ ID NO: 381 - DNA, 20 bp, Artificial Sequence
  Synthetic
tttgcaggaaatgctggcat

SEQ ID NO: 382 - RNA, 20 nt, Artificial Sequence
  Synthetic
uuugcaggaaaugcuggcau

SEQ ID NO: 383 - DNA, 20 bp, Artificial Sequence
  Synthetic
ttctcatttgcaggaaatgc

SEQ ID NO: 384 - RNA, 20 nt, Artificial Sequence
  Synthetic
uucucauuugcaggaaaugc

SEQ ID NO: 385 - DNA, 20 bp, Artificial Sequence
  Synthetic
catttagtgctgctctatgc

SEQ ID NO: 386 - RNA, 20 nt, Artificial Sequence
  Synthetic
cauuuagugcugcucuaugc

SEQ ID NO: 387 - DNA, 20 bp, Artificial Sequence
  Synthetic
caggaaatgctggcatagag

SEQ ID NO: 388 - RNA, 20 nt, Artificial Sequence
  Synthetic
caggaaaugcuggcauagag

SEQ ID NO: 389 - DNA, 20 bp, Artificial Sequence
  Synthetic
ttgcaggaaatgctggcata

SEQ ID NO: 390 - RNA, 20 nt, Artificial Sequence
  Synthetic
uugcaggaaaugcuggcaua

SEQ ID NO: 391 - DNA, 20 bp, Artificial Sequence
  Synthetic
atttgcaggaaatgctggca

SEQ ID NO: 392 - RNA, 20 nt, Artificial Sequence
  Synthetic
auuugcaggaaaugcuggca

SEQ ID NO: 393 - DNA, 20 bp, Artificial Sequence
  Synthetic
tggcatagagcagcactaaa

SEQ ID NO: 394 - RNA, 20 nt, Artificial Sequence
  Synthetic
uggcauagagcagcacuaaa

SEQ ID NO: 395 - DNA, 127 bp, Artificial Sequence
  Synthetic
ctttgggaagtatgttaatttcatggtacatgagtggctatcatactggctattatatggtaagtaatcactcagcatcttttcctgacaatttttttgtagttatgtgactttgttttgtaaattt

SEQ ID NO: 396 - DNA, 20 bp, Artificial Sequence
  Synthetic
tacatgagtggctatcatac

SEQ ID NO: 397 - RNA, 20 nt, Artificial Sequence
  Synthetic
uacaugaguggcuaucauac

SEQ ID NO: 398 - DNA, 20 bp, Artificial Sequence
  Synthetic
ttttccttacagggttttag

SEQ ID NO: 399 - DNA, 20 bp, Artificial Sequence
  Synthetic
atttcatggtacatgagtgg

SEQ ID NO: 400 - RNA, 10 nt, Artificial Sequence
  Synthetic
ugagccgcug

SEQ ID NO: 401 - RNA, 11 nt, Artificial Sequence
  Synthetic
ugagccgcugg

SEQ ID NO: 402 - protein, 36 aa, Artificial Sequence
  Synthetic
  misc_feature (3)..(29): Xaa can be any naturally occurring amino acid
  misc_feature (26)..(29): may be absent
  misc_feature (32)..(35): Xaa can be any naturally occurring amino acid
  misc_feature (33)..(35): may be absent
HEXXXXXXXXXXXXXXXXXXXXXXXXXXXPCXXXXC

SEQ ID NO: 403 - protein, 166 aa, Escherichia coli
SEVEFSHEYWMRHALTLAKRARDEREVPVGAVLVLNNRVIGEGWNRAIGLHDPTAHAEIMALRQGGLVMQNYRLIDATLYVTFEPCVMCAGAMIHSRIGRVVFGVRNAKTGAAGSLMDVLHYPGMNHRVEITEGILADECAALLCYFFRMPRQVFNAQKKAQSSTD

SEQ ID NO: 404 - DNA, 498 bp, Escherichia coli
tctgaggtggagttttcccacgagtactggatgagacatgccctgaccctggccaagagggcacgcgatgagagggaggtgcctgtgggagccgtgctggtgctgaacaatagagtgatcggcgagggctggaacagagccatcggcctgcacgacccaacagcccatgccgaaattatggccctgagacagggcggcctggtcatgcagaactacagactgattgacgccaccctgtacgtgacattcgagccttgcgtgatgtgcgccggcgccatgatccactctaggatcggccgcgtggtgtttggcgtgaggaacgcaaaaaccggcgccgcaggctccctgatggacgtgctgcactaccccggcatgaatcaccgcgtcgaaattaccgagggaatcctggcagatgaatgtgccgccctgctgtgctatttctttcggatgcctagacaggtgttcaatgctcagaagaaggcccagagctccaccgac

SEQ ID NO: 405 - RNA, 102 nt, Artificial Sequence
  Synthetic
auuuugucuaaaacccuguaguuuuagagcuagaaauagcaaguuaaaauaaaggcuaguccguuaucaacuugaaaaaguggcaccgagucggugcuuuuu

SEQ ID NO: 406 - RNA, 103 nt, Artificial Sequence
  Synthetic
auuuugucuaaaacccuguaguuuuagagcuagaaauagcaaguuaaaauaaggcuaguccguuaucaacuugaaaaaguggcaccgagucggugcuuuuuuu

SEQ ID NO: 407 - protein, 1367 aa, Artificial Sequence
  Synthetic
DKKYSIGLAIGTNSVGWAVITDEYKVPSKKFKVLGNTDRHSIKKNLIGALLFDSGETAEATRLKRTARRRYTRRKNRICYLQEIFSNEMAKVDDSFFHRLEESFLVEEDKKHERHPIFGNIVDEVAYHEKYPTIYHLRKKLVDSTDKADLRLIYLALAHMIKFRGHFLIEGDLNPDNSDVDKLFIQLVQTYNQLFEENPINASGVDAKAILSARLSKSRRLENLIAQLPGEKKNGLFGNLIALSLGLTPNFKSNFDLAEDAKLQLSKDTYDDDLDNLLAQIGDQYADLFLAAKNLSDAILLSDILRVNTEITKAPLSASMIKRYDEHHQDLTLLKALVRQQLPEKYKEIFFDQSKNGYAGYIDGGASQEEFYKFIKPILEKMDGTEELLVKLNREDLLRKQRTFDNGSIPHQIHLGELHAILRRQEDFYPFLKDNREKIEKILTFRIPYYVGPLARGNSRFAWMTRKSEETITPWNFEEVVDKGASAQSFIERMTNFDKNLPNEKVLPKHSLLYEYFTVYNELTKVKYVTEGMRKPAFLSGEQKKAIVDLLFKTNRKVTVKQLKEDYFKKIECFDSVEISGVEDRFNASLGTYHDLLKIIKDKDFLDNEENEDILEDIVLTLTLFEDREMIEERLKTYAHLFDDKVMKQLKRRRYTGWGRLSRKLINGIRDKQSGKTILDFLKSDGFANRNFMQLIHDDSLTFKEDIQKAQVSGQGDSLHEHIANLAGSPAIKKGILQTVKVVDELVKVMGRHKPENIVIEMARENQTTQKGQKNSRERMKRIEEGIKELGSQILKEHPVENTQLQNEKLYLYYLQNGRDMYVDQELDINRLSDYDVDHIVPQSFLKDDSIDNKVLTRSDKNRGKSDNVPSEEVVKKMKNYWRQLLNAKLITQRKFDNLTKAERGGLSELDKAGFIKRQLVETRQITKHVAQILDSRMNTKYDENDKLIREVKVITLKSKLVSDFRKDFQFYKVREINNYHHAHDAYLNAVVGTALIKKYPKLESEFVYGDYKVYDVRKMIAKSEQEIGKATAKYFFYSNIMNFFKTEITLANGEIRKRPLIETNGETGEIVWDKGRDFATVRKVLSMPQVNIVKKTEVQTGGFSKESILPKRNSDKLIARKKDWDPKKYGGFVSPTVAYSVLVVAKVEKGKSKKLKSVKELLGITIMERSSFEKNPIDFLEAKGYKEVKKDLIIKLPKYSLFELENGRKRMLASARELQKGNELALPSKYVNFLYLASHYEKLKGSPEDNEQKQLFVEQHKHYLDEIIEQISEFSKRVILADANLDKVLSAYNKHRDKPIREQAENIIHLFTLTNLGAPAAFKYFDTTIDRKQYRSTKEVLDATLIHQSITGLYETRIDLSQLGGD

SEQ ID NO: 408 - DNA, 20 bp, Artificial Sequence
  Synthetic
gtctaaaaccctgtaaggaa

SEQ ID NO: 409 - DNA, 20 bp, Artificial Sequence
  Synthetic
tgtctaaaaccctgtaagga

SEQ ID NO: 410 - DNA, 20 bp, Artificial Sequence
  Synthetic
ttgtctaaaaccctgtaagg

SEQ ID NO: 411 - DNA, 23 bp, Artificial Sequence
  Synthetic
attttgtctaaaaccctgtaagg

SEQ ID NO: 412 - DNA, 23 bp, Artificial Sequence
  Synthetic
gattttgtctaaaaccctgtaag

SEQ ID NO: 413 - DNA, 23 bp, Artificial Sequence
  Synthetic
tgattttgtctaaaaccctgtaa

SEQ ID NO: 414 - DNA, 21 bp, Artificial Sequence
  Synthetic
gaaaccctgtaaggaaaataa

SEQ ID NO: 415 - DNA, 21 bp, Artificial Sequence
  Synthetic
gtttgtctaaaaccctgtaag

SEQ ID NO: 416 - DNA, 21 bp, Artificial Sequence
  Synthetic
gttttgtctaaaaccctgtaa

SEQ ID NO: 417 - DNA, 20 bp, Artificial Sequence
  Synthetic
gtgagcaccttccttctttt

SEQ ID NO: 418 - DNA, 21 bp, Artificial Sequence
  Synthetic
gatgtgagcaccttccttctt

SEQ ID NO: 419 - DNA, 21 bp, Artificial Sequence
  Synthetic
gactccttaatttaaggaatg

SEQ ID NO: 420 - DNA, 21 bp, Artificial Sequence
  Synthetic
gcagacttactccttaattta

SEQ ID NO: 421 - DNA, 21 bp, Artificial Sequence
  Synthetic
gcagacttactccttaattta

SEQ ID NO: 422 - DNA, 21 bp, Artificial Sequence
  Synthetic
gtaatgctggcagacttactc

SEQ ID NO: 423 - DNA, 21 bp, Artificial Sequence
  Synthetic
gttcactttcataatgctggc

SEQ ID NO: 424 - DNA, 21 bp, Artificial Sequence
  Synthetic
gaagattcactttcataatgc

SEQ ID NO: 425 - DNA, 21 bp, Artificial Sequence
  Synthetic
gacaaaagtaagattcacttt

SEQ ID NO: 426 - DNA, 21 bp, Artificial Sequence
  Synthetic
gacttcctttattttccttac

SEQ ID NO: 427 - DNA, 21 bp, Artificial Sequence
  Synthetic
gaacttcctttattttcctta

SEQ ID NO: 428 - DNA, 21 bp, Artificial Sequence
  Synthetic
gtttccttacagggttttaga

SEQ ID NO: 429 - DNA, 21 bp, Artificial Sequence
  Synthetic
gtttagacaaaatcaaaaaga

SEQ ID NO: 430 - DNA, 21 bp, Artificial Sequence
  Synthetic
gttagacaaaatcaaaaagaa

SEQ ID NO: 431 - DNA, 21 bp, Artificial Sequence
  Synthetic
gtagacaaaatcaaaaagaag

SEQ ID NO: 432 - DNA, 20 bp, Artificial Sequence
  Synthetic
gacaaaatcaaaaagaagga

SEQ ID NO: 433 - DNA, 21 bp, Artificial Sequence
  Synthetic
gaaggaaggtgctcacattcc

SEQ ID NO: 434 - DNA, 21 bp, Artificial Sequence
  Synthetic
gtgctcacattccttaaatta

SEQ ID NO: 435 - DNA, 20 bp, Artificial Sequence
  Synthetic
gtgctcacattccttaaatt

SEQ ID NO: 436 - DNA, 21 bp, Artificial Sequence
  Synthetic
gtgctcacattccttaaatta

SEQ ID NO: 437 - DNA, 21 bp, Artificial Sequence
  Synthetic
gcacattccttaaattaagga

SEQ ID NO: 438 - DNA, 20 bp, Artificial Sequence
  Synthetic
gagtaagtctgccagcatta

SEQ ID NO: 439 - DNA, 20 bp, Artificial Sequence
  Synthetic
agtaagtctgccagcattat

SEQ ID NO: 440 - DNA, 20 bp, Artificial Sequence
  Synthetic
gtctgccagcattatgaaag

SEQ ID NO: 441 - DNA, 21 bp, Artificial Sequence
  Synthetic
gagtctgccagcattatgaaa

SEQ ID NO: 442 - DNA, 21 bp, Artificial Sequence
  Synthetic
gcttacttttgtaaaacttta

SEQ ID NO: 443 - DNA, 21 bp, Artificial Sequence
  Synthetic
gttgtaaaactttatggtttg

SEQ ID NO: 444 - DNA, 81 bp, Artificial Sequence
  Synthetic
aagcctctggttctaatttctcatttgcaggaaatgctggcatagagcagcactaaatgacaccactaaagaaacgatcag

SEQ ID NO: 445 - DNA, 21 bp, Artificial Sequence
  Synthetic
gtttcctgcaaatgagaaatt

SEQ ID NO: 446 - DNA, 20 bp, Artificial Sequence
  Synthetic
gccagcatttcctgcaaatg

SEQ ID NO: 447 - DNA, 21 bp, Artificial Sequence
  Synthetic
gatgccagcatttcctgcaaa

SEQ ID NO: 448 - DNA, 20 bp, Artificial Sequence
  Synthetic
gctctatgccagcatttcct

SEQ ID NO: 449 - DNA, 21 bp, Artificial Sequence
  Synthetic
gaatgctggcatagagcagca

SEQ ID NO: 450 - DNA, 21 bp, Artificial Sequence
  Synthetic
gtggcatagagcagcactaaa

SEQ ID NO: 451 - DNA, 20 bp, Artificial Sequence
  Synthetic
tcacgaaaaagccaagatgc

SEQ ID NO: 452 - DNA, 20 bp, Artificial Sequence
  Synthetic
ctgtacaggccacattgaga

SEQ ID NO: 453 - DNA, 20 bp, Artificial Sequence
  Synthetic
agagatccggacagaatcgc

SEQ ID NO: 454 - DNA, 20 bp, Artificial Sequence
  Synthetic
cagccacatggtgtcgcggc

SEQ ID NO: 455 - DNA, 20 bp, Artificial Sequence
  Synthetic
ggttttacagagatcccttc

SEQ ID NO: 456 - DNA, 20 bp, Artificial Sequence
  Synthetic
cagccggtgcagggtgccca

SEQ ID NO: 457 - DNA, 20 bp, Artificial Sequence
  Synthetic
cactgagtggtacaagaacg

SEQ ID NO: 458 - DNA, 20 bp, Artificial Sequence
  Synthetic
tgcctatcgccacagcaagc

SEQ ID NO: 459 - DNA, 20 bp, Artificial Sequence
  Synthetic
aacactgagtggtacaagaa

SEQ ID NO: 460 - DNA, 20 bp, Artificial Sequence
  Synthetic
tggctgctcggtctccaggg

SEQ ID NO: 461 - DNA, 20 bp, Artificial Sequence
  Synthetic
ttcccagtgggcacagagga

SEQ ID NO: 462 - protein, 167 aa, Artificial Sequence
  Synthetic
MSEVEFSHEYWMRHALTLAKRARDEREVPVGAVLVLNNRVIGEGWNRAIGLHDPTAHAEIMALRQGGLVMQNYRLIDATLYVTFEPCVMCAGAMIHSRIGRVVFGWRNSKRGAAGSLMNVLNYPGMNHRVEITEGILADECAALLCDFYRMPRQVFNAQKKAQSSIN

SEQ ID NO: 463 - protein, 2135 aa, Artificial Sequence
  Synthetic
MKRTADGSEFESPKKKRKVSEVEFSHEYWMRHALTLAKRAWDEREVPVGAVLVHNNRVIGEGWNRPIGRHDPTAHAEIMALRQGGLVMQNYRLIDATLYVTLEPCVMCAGAMIHSRIGRVVFGARDAKTGAAGSLMDVLHHPGMNHRVEITEGILADECAALLSDFFRMRRQEIKAQKKAQSSTDSGGSSGGSSGSETPGTSESATPESSGGSSGGSGTTGATGGAGCTCTGGGCCTTCTTCTGAGCATTGAACACCTGTCTAGGCATCCGATAGAAATCGCACAGCAGGGCGGCACATTCATCTGCCAGGATTCCCTCGGTAATTTCGACGCGGTGATTCATGCCGGGGTAGTTCAGCACGTTCATCAGGGAGCCTGCGGCGCCTCTTTTTGAGTTCCTCACGCCAAACACCACGCGGCCGATCCTAGAGTGGATCATGGCGCCGGCGCACATCACGCAAGGCTCGAATGTCACGTACAGGGTGGCGTCAATCAGTCTGTAGTTCTGCATGACCAGGCCGCCCTGTCTCAGGGCCATAATTTCGGCATGGGCTGTTGGGTCGTGCAGGCCGATGGCTCTGTTCCAGCCCTCGCCGATCACTCTATTGTTCAGCACCAGCACGGCTCCCACAGGCACCTCCCTCTCATCCCGTGCCCTCTTGGCCAGGGTCAGGGCATGTCTCATCCAGTACTCGTGGGAAAACTCCACCTCAGASGGSSGGSSGSETPGTSESATPESSGGSSGGSDKKYSIGLAIGTNSVGWAVITDEYKVPSKKFKVLGNTDRHSIKKNLIGALLFDSGETAEATRLKRTARRRYTRRKNRICYLQEIFSNEMAKVDDSFFHRLEESFLVEEDKKHERHPIFGNIVDEVAYHEKYPTIYHLRKKLVDSTDKADLRLIYLALAHMIKFRGHFLIEGDLNPDNSDVDKLFIQLVQTYNQLFEENPINASGVDAKAILSARLSKSRRLENLIAQLPGEKKNGLFGNLIALSLGLTPNFKSNFDLAEDAKLQLSKDTYDDDLDNLLAQIGDQYADLFLAAKNLSDAILLSDILRVNTEITKAPLSASMVKRYDEHHQDLTLLKALVRQQLPEKYKEIFFDQSKNGYAGYIDGGASQEEFYKFIKPILEKMDGTEELLVKLNREDLLRKQRTFDNGIIPHQIHLGELHAILRRQGDFYPFLKDNREKIEKILTFRIPYYVGPLARGNSRFAWMTRKSEETITPWNFEEVVDKGASAQSFIERMTNFDKNLPNEKVLPKHSLLYEYFTVYNELTKVKYVTEGMRKPAFLSGEQKKAIVDLLFKTNRKVTVKQLKEDYFKKIECFDSVEISGVEDRFNASLGTYHDLLKIIKDKDFLDNEENEDILEDIVLTLTLFEDREMIEERLKTYAHLFDDKVMKQLKRLRYTGWGRLSRKLINGIRDKQSGKTILDFLKSDGFANRNFMQLIHDDSLTFKEDIQKAQVSCQGDSLHEHIANLAGSPAIKKGILQTVKVVDELIKVMGGHKPENIVIEMARENQTTQKGQKNSRERMKRIEEGIKELGSQILKEHPVENTQLQNEKLYLYYLQNGRDMYVDQELDINRLSDYDVDHIVPQSFLKDDSIENKVLTRSDKNRGKSDNVPSEEVVKKMKNYWRQLLNAKLITQRKFDNLTKAERGGLSELDKAGFIKRQLAETRQITKHVAQILDSRMNTKYDENDKLIREVKVITLKSKLVSDFRKDFQFYKVREINNYHHAHDAYLNAVVGTALIKKYPKLESEFVYGDYKVYDVRKMIAKSEQEIGKATAKYFFYSNIMNFFKTEITLANGEIRKRPLIETNGETGEIVWDKGRDFATVRKVLSMPQVNIVKKTEVQTGGFSKESILPKGNSDKLIARKKDWDPKKYGGFNSPTVAYSVLVVAKVEKGKSKKLKSVKELLGITIMERSSFEKNPIGFLEAKGYKEVKKDLIIKLPKYSLFELENGRKRMLASASVLHKGNELALPSKYVNFLYLASHYEKLKGSSEDNKQKQLFVEQHKHYLDEIIEQISEFSKRVILADANLDKVLSAYNKHRDKPIREQAENIIHLFTLTNLGASAAFKYFDTTIGRKLYTSTKEVLDATLIHQSITGLYETRIDLSQLGGDSGGSKRTADGSEFEPKKKRKV

SEQ ID NO: 464 - protein, 2127 aa, Artificial Sequence
  Synthetic
MKRTADGSEFESPKKKRKVSEVEFSHEYWMRHALTLAKRAWDEREVPVGAVLVHNNRVIGEGWNRPIGRHDPTAHAEIMALRQGGLVMQNYRLIDATLYVTLEPCVMCAGAMIHSRIGRVVFGARDAKTGAAGSLMDVLHHPGMNHRVEITEGILADECAALLSDFFRMRRQEIKAQKKAQSSTDSGGSSGGSSGSETPGTSESATPESSGGSSGGSGTTGATGGAGCTCTGGGCCTTCTTCTGAGCATTGAACACCTGTCTAGGCATCCGATAGAAATCGCACAGCAGGGCGGCACATTCATCTGCCAGGATTCCCTCGGTAATTTCGACGCGGTGATTCATGCCGGGGTAGTTCAGCACGTTCATCAGGGAGCCTGCGGCGCCTCTTTTTGAGTTCCTCACGCCAAACACCACGCGGCCGATCCTAGAGTGGATCATGGCGCCGGCGCACATCACGCAAGGCTCGAATGTCACGTACAGGGTGGCGTCAATCAGTCTGTAGTTCTGCATGACCAGGCCGCCCTGTCTCAGGGCCATAATTTCGGCATGGGCTGTTGGGTCGTGCAGGCCGATGGCTCTGTTCCAGCCCTCGCCGATCACTCTATTGTTCAGCACCAGCACGGCTCCCACAGGCACCTCCCTCTCATCCCGTGCCCTCTTGGCCAGGGTCAGGGCATGTCTCATCCAGTACTCGTGGGAAAACTCCACCTCAGASGGSSGGSSGSETPGTSESATPESSGGSSGGSDKKYSIGLAIGTNSVGWAVITDEYKVPSKKFKVLGNTDRHSIKKNLIGALLFDSGETAEATRLKRTARRRYTRRKNRICYLQEIFSNEMAKVDDSFFHRLEESFLVEEDKKHERHPIFGNIVDEVAYHEKYPTIYHLRKKLVDSTDKADLRLIYLALAHMIKFRGHFLIEGDLNPDNSDVDKLFIQLVQTYNQLFEENPINASGVDAKAILSARLSKSRRLENLIAQLPGEKKNGLFGNLIALSLGLTPNFKSNFDLAEDAKLQLSKDTYDDDLDNLLAQIGDQYADLFLAAKNLSDAILLSDILRVNTEITKAPLSASMIKRYDEHHQDLTLLKALVRQQLPEKYKEIFFDQSKNGYAGYIDGGASQEEFYKFIKPILEKMDGTEELLVKLNREDLLRKQRTFDNGSIPHQIHLGELHAILRRQEDFYPFLKDNREKIEKILTFRIPYYVGPLARGNSRFAWMTRKSEETITPWNFEEVVDKGASAQSFIERMTNFDKNLPNEKVLPKHSLLYEYFTVYNELTKVKYVTEGMRKPAFLSGEQKKAIVDLLFKTNRKVTVKQLKEDYFKKIECFDSVEISGVEDRFNASLGTYHDLLKIIKDKDFLDNEENEDILEDIVLTLTLFEDREMIEERLKTYAHLFDDKVMKQLKRRRYTGWGRLSRKLINGIRDKQSGKTILDFLKSDGFANRNFMQLIHDDSLTFKEDIQKAQVSGQGDSLHEHIANLAGSPAIKKGILQTVKVVDELVKVMGRHKPENIVIEMARENQTTQKGQKNSRERMKRIEEGIKELGSQILKEHPVENTQLQNEKLYLYYLQNGRDMYVDQELDINRLSDYDVDHIVPQSFLKDDSIDNKVLTRSDKNRGKSDNVPSEEVVKKMKNYWRQLLNAKLITQRKFDNLTKAERGGLSELDKAGFIKRQLVETRQITKHVAQILDSRMNTKYDENDKLIREVKVITLKSKLVSDFRKDFQFYKVREINNYHHAHDAYLNAVVGTALIKKYPKLESEFVYGDYKVYDVRKMIAKSEQEIGKATAKYFFYSNIMNFFKTEITLANGEIRKRPLIETNGETGEIVWDKGRDFATVRKVLSMPQVNIVKKTEIQTVGQNGGLFDDNPKSPLEVTPSKLVPLKKELNPKKYGGYQKPTTAYPVLLITDTKQLIPISVMNKKQFEQNPVKFLRDRGYQQVGKNDFIKLPKYTLVDIGDGIKRLWASSKEIHKGNQLVVSKKSQILLYHAHHLDSDLSNDYLQNHNQQFDVLFNEIISFSKKCKLGKEHIQKIENVYSNKKNSASIEELAESFIKLLGFTQLGATSPFNFLGVKLNQKQYKGKKDYILPCTEGTLIRQSITGLYETRVDLSKIGEDSGGSKRTADGSEFEPKKKRKV

SEQ ID NO: 465 - protein, 2155 aa, Artificial Sequence
  Synthetic
MKRTADGSEFESPKKKRKVSEVEFSHEYWMRHALTLAKRAWDEREVPVGAVLVHNNRVIGEGWNRPIGRHDPTAHAEIMALRQGGLVMQNYRLIDATLYVTLEPCVMCAGAMIHSRIGRVVFGARDAKTGAAGSLMDVLHHPGMNHRVEITEGILADECAALLSDFFRMRRQEIKAQKKAQSSTDSGGSSGGSSGSETPGTSESATPESSGGSSGGSGTTGATGGAGCTCTGGGCCTTCTTCTGAGCATTGAACACCTGTCTAGGCATCCGATAGAAATCGCACAGCAGGGCGGCACATTCATCTGCCAGGATTCCCTCGGTAATTTCGACGCGGTGATTCATGCCGGGGTAGTTCAGCACGTTCATCAGGGAGCCTGCGGCGCCTCTTTTTGAGTTCCTCACGCCAAACACCACGCGGCCGATCCTAGAGTGGATCATGGCGCCGGCGCACATCACGCAAGGCTCGAATGTCACGTACAGGGTGGCGTCAATCAGTCTGTAGTTCTGCATGACCAGGCCGCCCTGTCTCAGGGCCATAATTTCGGCATGGGCTGTTGGGTCGTGCAGGCCGATGGCTCTGTTCCAGCCCTCGCCGATCACTCTATTGTTCAGCACCAGCACGGCTCCCACAGGCACCTCCCTCTCATCCCGTGCCCTCTTGGCCAGGGTCAGGGCATGTCTCATCCAGTACTCGTGGGAAAACTCCACCTCAGASGGSSGGSSGSETPGTSESATPESSGGSSGGSNIMNFFKTEITLANGEIRKRPLIETNGETGEIVWDKGRDFATVRKVLSMPQVNIVKKTEVQTGGFSKESIRPKRNSDKLIARKKDWDPKKYGGFVSPTVAYSVLVVAKVEKGKSKKLKSVKELLGITIMERSSFEKNPIDFLEAKGYKEVKKDLIIKLPKYSLFELENGRKRMLASARFLQKGNELALPSKYVNFLYLASHYEKLKGSPEDNEQKQLFVEQHKHYLDEIIEQISEFSKRVILADANLDKVLSAYNKHRDKPIREQAENIIHLFTLTNLGAPRAFKYFDTTIDRKVYRSTKEVLDATLIHQSITGLYETRIDLSQLGGDGGSGGSGGSGGSGGSGGSGGDKKYSIGLAIGTNSVGWAVITDEYKVPSKKFKVLGNTDRHSIKKNLIGALLFDSGETAEATRLKRTARRRYTRRKNRICYLQEIFSNEMAKVDDSFFHRLEESFLVEEDKKHERHPIFGNIVDEVAYHEKYPTIYHLRKKLVDSTDKADLRLIYLALAHMIKFRGHFLIEGDLNPDNSDVDKLFIQLVQTYNQLFEENPINASGVDAKAILSARLSKSRRLENLIAQLPGEKKNGLFGNLIALSLGLTPNFKSNFDLAEDAKLQLSKDTYDDDLDNLLAQIGDQYADLFLAAKNLSDAILLSDILRVNTEITKAPLSASMIKRYDEHHQDLTLLKALVRQQLPEKYKEIFFDQSKNGYAGYIDGGASQEEFYKFIKPILEKMDGTEELLVKLNREDLLRKQRTFDNGSIPHQIHLGELHAILRRQEDFYPFLKDNREKIEKILTFRIPYYVGPLARGNSRFAWMTRKSEETITPWNFEEVVDKGASAQSFIERMTNFDKNLPNEKVLPKHSLLYEYFTVYNELTKVKYVTEGMRKPAFLSGEQKKAIVDLLFKTNRKVTVKQLKEDYFKKIECFDSVEISGVEDRFNASLGTYHDLLKIIKDKDFLDNEENEDILEDIVLTLTLFEDREMIEERLKTYAHLFDDKVMKQLKRRRYTGWGRLSRKLINGIRDKQSGKTILDFLKSDGFANRNFMQLIHDDSLTFKEDIQKAQVSGQGDSLHEHIANLAGSPAIKKGILQTVKVVDELVKVMGRHKPENIVIEMARENQTTQKGQKNSRERMKRIEEGIKELGSQILKEHPVENTQLQNEKLYLYYLQNGRDMYVDQELDINRLSDYDVDHIVPQSFLKDDSIDNKVLTRSDKNRGKSDNVPSEEVVKKMKNYWRQLLNAKLITQRKFDNLTKAERGGLSELDKAGFIKRQLVETRQITKHVAQILDSRMNTKYDENDKLIREVKVITLKSKLVSDFRKDFQFYKVREINNYHHAHDAYLNAVVGTALIKKYPKLESEFVYGDYKVYDVRKMIAKSEQEIGKATAKYFFYSSGGSKRTADGSEFEPKKKRKV

SEQ ID NO: 466 - protein, 1821 aa, Artificial Sequence
  Synthetic
MKRTADGSEFESPKKKRKVSEVEFSHEYWMRHALTLAKRAWDEREVPVGAVLVHNNRVIGEGWNRPIGRHDPTAHAEIMALRQGGLVMQNYRLIDATLYVTLEPCVMCAGAMIHSRIGRVVFGARDAKTGAAGSLMDVLHHPGMNHRVEITEGILADECAALLSDFFRMRRQEIKAQKKAQSSTDSGGSSGGSSGSETPGTSESATPESSGGSSGGSGTTGATGGAGCTCTGGGCCTTCTTCTGAGCATTGAACACCTGTCTAGGCATCCGATAGAAATCGCACAGCAGGGCGGCACATTCATCTGCCAGGATTCCCTCGGTAATTTCGACGCGGTGATTCATGCCGGGGTAGTTCAGCACGTTCATCAGGGAGCCTGCGGCGCCTCTTTTTGAGTTCCTCACGCCAAACACCACGCGGCCGATCCTAGAGTGGATCATGGCGCCGGCGCACATCACGCAAGGCTCGAATGTCACGTACAGGGTGGCGTCAATCAGTCTGTAGTTCTGCATGACCAGGCCGCCCTGTCTCAGGGCCATAATTTCGGCATGGGCTGTTGGGTCGTGCAGGCCGATGGCTCTGTTCCAGCCCTCGCCGATCACTCTATTGTTCAGCACCAGCACGGCTCCCACAGGCACCTCCCTCTCATCCCGTGCCCTCTTGGCCAGGGTCAGGGCATGTCTCATCCAGTACTCGTGGGAAAACTCCACCTCAGASGGSSGGSSGSETPGTSESATPESSGGSSGGSGKRNYILGLAIGITSVGYGIIDYETRDVIDAGVRLFKEANVENNEGRRSKRGARRLKRRRRHRIQRVKKLLFDYNLLTDHSELSGINPYEARVKGLSQKLSEEEFSAALLHLAKRRGVHNVNEVEEDTGNELSTKEQISRNSKALEEKYVAELQLERLKKDGEVRGSINRFKTSDYVKEAKQLLKVQKAYHQLDQSFIDTYIDLLETRRTYYEGPGEGSPFGWKDIKEWYEMLMGHCTYFPEELRSVKYAYNADLYNALNDLNNLVITRDENEKLEYYEKFQIIENVFKQKKKPTLKQIAKEILVNEEDIKGYRVTSTGKPEFTNLKVYHDIKDITARKEIIENAELLDQIAKILTIYQSSEDIQEELTNLNSELTQEEIEQISNLKGYTGTHNLSLKAINLILDELWHTNDNQIAIFNRLKLVPKKVDLSQQKEIPTTLVDDFILSPVVKRSFIQSIKVINAIIKKYGLPNDIIIELAREKNSKDAQKMINEMQKRNRQTNERIEEIIRTTGKENAKYLIEKIKLHDMQEGKCLYSLEAIPLEDLLNNPFNYEVDHIIPRSVSFDNSFNNKVLVKQEENSKKGNRTPFQYLSSSDSKISYETFKKHILNLAKGKGRISKTKKEYLLEERDINRFSVQKDFINRNLVDTRYATRGLMNLLRSYFRVNNLDVKVKSINGGFTSFLRRKWKFKKERNKGYKHHAEDALIIANADFIFKEWKKLDKAKKVMENQMFEEKQAESMPEIETEQEYKEIFITPHQIKHIKDFKDYKYSHRVDKKPNRELINDTLYSTRKDDKGNTLIVNNLNGLYDKDNDKLKKLINKSPEKLLMYHHDPQTYQKLKLIMEQYGDEKNPLYKYYEETGNYLTKYSKKDNGPVIKKIKYYGNKLNAHLDITDDYPNSRNKVVKLSLKPYRFDVYLDNGVYKFVTVKNLDVIKKENYYEVNSKCYEEAKKLKKISNQAEFIASFYNNDLIKINGELYRVIGVNNDLLNRIEVNMIDITYREYLENMNDKRPPRIIKTIASKTQSIKKYSTDILGNLYEVKSKKHPQIIKKGSGGSKRTADGSEFEPKKKRKV

SEQ ID NO: 467 - protein, 2135 aa, Artificial Sequence
  Synthetic
MKRTADGSEFESPKKKRKVSEVEFSHEYWMRHALTLAKRAWDEREVPVGAVLVHNNRVIGEGWNRPIGRHDPTAHAEIMALRQGGLVMQNYRLIDATLYVTLEPCVMCAGAMIHSRIGRVVFGARDAKTGAAGSLMDVLHHPGMNHRVEITEGILADECAALLSDFFRMRRQEIKAQKKAQSSTDSGGSSGGSSGSETPGTSESATPESSGGSSGGSGTTGATGGAGCTCTGGGCCTTCTTCTGAGCATTGAACACCTGTCTAGGCATCCGATAGAAATCGCACAGCAGGGCGGCACATTCATCTGCCAGGATTCCCTCGGTAATTTCGACGCGGTGATTCATGCCGGGGTAGTTCAGCACGTTCATCAGGGAGCCTGCGGCGCCTCTTTTTGAGTTCCTCACGCCAAACACCACGCGGCCGATCCTAGAGTGGATCATGGCGCCGGCGCACATCACGCAAGGCTCGAATGTCACGTACAGGGTGGCGTCAATCAGTCTGTAGTTCTGCATGACCAGGCCGCCCTGTCTCAGGGCCATAATTTCGGCATGGGCTGTTGGGTCGTGCAGGCCGATGGCTCTGTTCCAGCCCTCGCCGATCACTCTATTGTTCAGCACCAGCACGGCTCCCACAGGCACCTCCCTCTCATCCCGTGCCCTCTTGGCCAGGGTCAGGGCATGTCTCATCCAGTACTCGTGGGAAAACTCCACCTCAGASGGSSGGSSGSETPGTSESATPESSGGSSGGSDKKYSIGLAIGTNSVGWAVITDEYKVPSKKFKVLGNTDRHSIKKNLIGALLFDSGETAEATRLKRTARRRYTRRKNRICYLQEIFSNEMAKVDDSFFHRLEESFLVEEDKKHERHPIFGNIVDEVAYHEKYPTIYHLRKKLVDSTDKADLRLIYLALAHMIKFRGHFLIEGDLNPDNSDVDKLFIQLVQTYNQLFEENPINASGVDAKAILSARLSKSRRLENLIAQLPGEKKNGLFGNLIALSLGLTPNFKSNFDLAEDAKLQLSKDTYDDDLDNLLAQIGDQYADLFLAAKNLSDAILLSDILRVNTEITKAPLSASMVKRYDEHHQDLTLLKALVRQQLPEKYKEIFFDQSKNGYAGYIDGGASQEEFYKFIKPILEKMDGTEELLVKLNREDLLRKQRTFDNGIIPHQIHLGELHAILRRQGDFYPFLKDNREKIEKILTFRIPYYVGPLARGNSRFAWMTRKSEETITPWNFEEVVDKGASAQSFIERMTNFDKNLPNEKVLPKHSLLYEYFTVYNELTKVKYVTEGMRKPAFLSGEQKKAIVDLLFKTNRKVTVKQLKEDYFKKIECFDSVEISGVEDRFNASLGTYHDLLKIIKDKDFLDNEENEDILEDIVLTLTLFEDREMIEERLKTYAHLFDDKVMKQLKRLRYTGWGRLSRKLINGIRDKQSGKTILDFLKSDGFANRNFMQLIHDDSLTFKEDIQKAQVSCQGDSLHEHIANLAGSPAIKKGILQTVKVVDELIKVMGGHKPENIVIEMARENQTTQKGQKNSRERMKRIEEGIKELGSQILKEHPVENTQLQNEKLYLYYLQNGRDMYVDQELDINRLSDYDVDHIVPQSFLKDDSIENKVLTRSDKNRGKSDNVPSEEVVKKMKNYWRQLLNAKLITQRKFDNLTKAERGGLSELDKAGFIKRQLAETRQITKHVAQILDSRMNTKYDENDKLIREVKVITLKSKLVSDFRKDFQFYKVREINNYHHAHDAYLNAVVGTALIKKYPKLESEFVYGDYKVYDVRKMIAKSEQEIGKATAKYFFYSNIMNFFKTEITLANGEIRKRPLIETNGETGEIVWDKGRDFATVRKVLSMPQVNIVKKTEVQTGGFSKESILPKGNSDKLIARKKDWDPKKYGGFNSPTVAYSVLVVAKVEKGKSKKLKSVKELLGITIMERSSFEKNPIDFLEAKGYKEVKKDLIIKLPKYSLFELENGRKRMLASAGVLQKGNELALPSKYVNFLYLASHYEKLKGSPEDNEQKQLFVEQHKHYLDEIIEQISEFSKRVILADANLDKVLSAYNKHRDKPIREQAENIIHLFTLTNLGAPAAFKYFDTTINRKQYNTTKEVLDATLIRQSITGLYETRIDLSQLGGDSGGSKRTADGSEFEPKKKRKV

SEQ ID NO: 468 - protein, 2135 aa, Artificial Sequence
  Synthetic
MKRTADGSEFESPKKKRKVSEVEFSHEYWMRHALTLAKRAWDEREVPVGAVLVHNNRVIGEGWNRPIGRHDPTAHAEIMALRQGGLVMQNYRLIDATLYVTLEPCVMCAGAMIHSRIGRVVFGARDAKTGAAGSLMDVLHHPGMNHRVEITEGILADECAALLSDFFRMRRQEIKAQKKAQSSTDSGGSSGGSSGSETPGTSESATPESSGGSSGGSGTTGATGGAGCTCTGGGCCTTCTTCTGAGCATTGAACACCTGTCTAGGCATCCGATAGAAATCGCACAGCAGGGCGGCACATTCATCTGCCAGGATTCCCTCGGTAATTTCGACGCGGTGATTCATGCCGGGGTAGTTCAGCACGTTCATCAGGGAGCCTGCGGCGCCTCTTTTTGAGTTCCTCACGCCAAACACCACGCGGCCGATCCTAGAGTGGATCATGGCGCCGGCGCACATCACGCAAGGCTCGAATGTCACGTACAGGGTGGCGTCAATCAGTCTGTAGTTCTGCATGACCAGGCCGCCCTGTCTCAGGGCCATAATTTCGGCATGGGCTGTTGGGTCGTGCAGGCCGATGGCTCTGTTCCAGCCCTCGCCGATCACTCTATTGTTCAGCACCAGCACGGCTCCCACAGGCACCTCCCTCTCATCCCGTGCCCTCTTGGCCAGGGTCAGGGCATGTCTCATCCAGTACTCGTGGGAAAACTCCACCTCAGASGGSSGGSSGSETPGTSESATPESSGGSSGGSDKKYSIGLAIGTNSVGWAVITDEYKVPSKKFKVLGNTDRHSIKKNLIGALLFDSGETAEATRLKRTARRRYTRRKNRICYLQEIFSNEMAKVDDSFFHRLEESFLVEEDKKHERHPIFGNIVDEVAYHEKYPTIYHLRKKLVDSTDKADLRLIYLALAHMIKFRGHFLIEGDLNPDNSDVDKLFIQLVQTYNQLFEENPINASGVDAKAILSARLSKSRRLENLIAQLPGEKKNGLFGNLIALSLGLTPNFKSNFDLAEDAKLQLSKDTYDDDLDNLLAQIGDQYADLFLAAKNLSDAILLSDILRVNTEITKAPLSASMVKRYDEHHQDLTLLKALVRQQLPEKYKEIFFDQSKNGYAGYIDGGASQEEFYKFIKPILEKMDGTEELLVKLNREDLLRKQRTFDNGIIPHQIHLGELHAILRRQGDFYPFLKDNREKIEKILTFRIPYYVGPLARGNSRFAWMTRKSEETITPWNFEEVVDKGASAQSFIERMTNFDKNLPNEKVLPKHSLLYEYFTVYNELTKVKYVTEGMRKPAFLSGEQKKAIVDLLFKTNRKVTVKQLKEDYFKKIECFDSVEISGVEDRFNASLGTYHDLLKIIKDKDFLDNEENEDILEDIVLTLTLFEDREMIEERLKTYAHLFDDKVMKQLKRLRYTGWGRLSRKLINGIRDKQSGKTILDFLKSDGFANRNFMQLIHDDSLTFKEDIQKAQVSCQGDSLHEHIANLAGSPAIKKGILQTVKVVDELIKVMGGHKPENIVIEMARENQTTQKGQKNSRERMKRIEEGIKELGSQILKEHPVENTQLQNEKLYLYYLQNGRDMYVDQELDINRLSDYDVDHIVPQSFLKDDSIENKVLTRSDKNRGKSDNVPSEEVVKKMKNYWRQLLNAKLITQRKFDNLTKAERGGLSELDKAGFIKRQLAETRQITKHVAQILDSRMNTKYDENDKLIREVKVITLKSKLVSDFRKDFQFYKVREINNYHHAHDAYLNAVVGTALIKKYPKLESEFVYGDYKVYDVRKMIAKSEQEIGKATAKYFFYSNIMNFFKTEITLANGEIRKRPLIETNGETGEIVWDKGRDFATVRKVLSMPQVNIVKKTEVQTGGFSKESILPKGNSDKLIARKKDWDPKKYGGFNSPTAAYSVLVVAKVEKGKSKKLKSVKELLGITIMERSSFEKNPIGFLEAKGYKEVKKDLIIKLPKYSLFELENGRKRMLASAGVLHKGNELALPSKYVNFLYLASHYEKLKGSPEDNEQKQLFVEQHKHYLDEIIEQISEFSKRVILADANLDKVLSAYNKHRDKPIREQAENIIHLFTLTNLGVPAAFKYFDTTIDKKRYTSTKEVLDATLIHQSITGLYETRIDLSQLGGDSGGSKRTADGSEFEPKKKRKV

SEQ ID NO: 469 - protein, 3927 aa, Artificial Sequence
  Synthetic
MKRTADGSEFESPKKKRKVSEVEFSHEYWMRHALTLAKRAWDEREVPVGAVLVHNNRVIGEGWNRPIGRHDPTAHAEIMALRQGGLVMQNYRLIDATLYVTLEPCVMCAGAMIHSRIGRVVFGARDAKTGAAGSLMDVLHHPGMNHRVEITEGILADECAALLSDFFRMRRQEIKAQKKAQSSTDSGGSSGGSSGSETPGTSESATPESSGGSSGGSGTTGATGGAGCTCTGGGCCTTCTTCTGAGCATTGAACACCTGTCTAGGCATCCGATAGAAATCGCACAGCAGGGCGGCACATTCATCTGCCAGGATTCCCTCGGTAATTTCGACGCGGTGATTCATGCCGGGGTAGTTCAGCACGTTCATCAGGGAGCCTGCGGCGCCTCTTTTTGAGTTCCTCACGCCAAACACCACGCGGCCGATCCTAGAGTGGATCATGGCGCCGGCGCACATCACGCAAGGCTCGAATGTCACGTACAGGGTGGCGTCAATCAGTCTGTAGTTCTGCATGACCAGGCCGCCCTGTCTCAGGGCCATAATTTCGGCATGGGCTGTTGGGTCGTGCAGGCCGATGGCTCTGTTCCAGCCCTCGCCGATCACTCTATTGTTCAGCACCAGCACGGCTCCCACAGGCACCTCCCTCTCATCCCGTGCCCTCTTGGCCAGGGTCAGGGCATGTCTCATCCAGTACTCGTGGGAAAACTCCACCTCAGASGGSSGGSSGSETPGTSESATPESSGGSSGGSGGGAAGCGAAATTACATTCTGGGGCTGGCCATTGGCATTACATCAGTGGGCTATGGCATCATTGACTACGAGACAAGGGACGTGATCGACGCCGGCGTGAGACTGTTCAAGGAGGCCAACGTGGAGAACAATGAGGGCCGGAGATCCAAGAGGGGAGCAAGGCGCCTGAAGCGGAGAAGGCGCCACAGAATCCAGAGAGTGAAGAAGCTGCTGTTCGATTACAACCTGCTGACCGACCACTCCGAGCTGTCTGGCATCAATCCTTATGAGGCCAGAGTGAAGGGCCTGTCCCAGAAGCTGTCTGAGGAGGAGTTTAGCGCCGCCCTGCTGCACCTGGCAAAGAGGAGAGGCGTGCACAACGTGAATGAGGTGGAGGAGGACACCGGCAACGAGCTGTCCACAAAGGAGCAGATCAGCCGCAATTCCAAGGCCCTGGAGGAGAAGTATGTGGCCGAGCTGCAGCTGGAGCGGCTGAAGAAGGATGGCGAGGTGAGGGGCTCCATCAATCGCTTCAAGACCTCTGACTACGTGAAGGAGGCCAAGCAGCTGCTGAAGGTGCAGAAGGCCTACCACCAGCTGGATCAGTCCTTTATCGATACATATATCGACCTGCTGGAGACAAGGCGCACATACTATGAGGGACCAGGAGAGGGCTCTCCCTTCGGCTGGAAGGACATCAAGGAGTGGTACGAGATGCTGATGGGCCACTGCACCTATTTTCCAGAGGAGCTGAGAAGCGTGAAGTACGCCTATAACGCCGATCTGTACAACGCCCTGAATGACCTGAACAACCTGGTCATCACCAGGGATGAGAACGAGAAGCTGGAGTACTATGAGAAGTTCCAGATCATCGAGAACGTGTTCAAGCAGAAGAAGAAGCCTACACTGAAGCAGATCGCCAAGGAGATCCTGGTGAACGAGGAGGACATCAAGGGCTACCGCGTGACCTCCACAGGCAAGCCAGAGTTCACCAATCTGAAGGTGTATCACGATATCAAGGACATCACAGCCCGGAAGGAGATCATCGAGAACGCCGAGCTGCTGGATCAGATCGCCAAGATCCTGACCATCTATCAGAGCTCCGAGGACATCCAGGAGGAGCTGACCAACCTGAATAGCGAGCTGACACAGGAGGAGATCGAGCAGATCAGCAATCTGAAGGGCTACACCGGCACACACAACCTGAGCCTGAAGGCCATCAATCTGATCCTGGATGAGCTGTGGCACACAAACGACAATCAGATCGCCATCTTTAACCGGCTGAAGCTGGTGCCAAAGAAGGTGGACCTGTCCCAGCAGAAGGAGATCCCAACCACACTGGTGGACGATTTCATCCTGTCTCCCGTGGTGAAGCGGAGCTTCATCCAGAGCATCAAAGTGATCAACGCCATCATCAAGAAGTACGGCCTGCCCAATGATATCATCATCGAGCTGGCCAGGGAGAAGAACTCCAAGGACGCCCAGAAGATGATCAATGAGATGCAGAAGAGGAACCGCCAGACCAATGAGCGGATCGAGGAGATCATCAGAACCACAGGCAAGGAGAACGCCAAGTACCTGATCGAGAAGATCAAGCTGCACGATATGCAGGAGGGCAAGTGTCTGTATTCTCTGGAGGCCATCCCTCTGGAGGACCTGCTGAACAATCCATTCAACTACGAGGTGGATCACATCATCCCCCGGAGCGTGAGCTTCGACAATTCTTTTAACAATAAGGTGCTGGTGAAGCAGGAGGAGAACAGCAAGAAGGGCAATAGGACCCCTTTCCAGTACCTGTCTAGCTCCGATTCTAAGATCAGCTACGAGACATTCAAGAAGCACATCCTGAATCTGGCCAAGGGCAAGGGCCGCATCAGCAAGACCAAGAAGGAGTACCTGCTGGAGGAGCGGGACATCAACAGATTCTCCGTGCAGAAGGACTTCATCAACCGGAATCTGGTGGACACCAGATACGCCACACGCGGCCTGATGAATCTGCTGCGGTCTTATTTCAGAGTGAACAATCTGGATGTGAAGGTGAAGAGCATCAACGGCGGCTTCACCTCCTTTCTGCGGAGAAAGTGGAAGTTTAAGAAGGAGCGCAACAAGGGCTATAAGCACCACGCCGAGGATGCCCTGATCATCGCCAATGCCGACTTCATCTTTAAGGAGTGGAAGAAGCTGGACAAGGCCAAGAAAGTGATGGAGAACCAGATGTTCGAGGAGAAGCAGGCCGAGAGCATGCCCGAGATCGAGACAGAGCAGGAGTACAAGGAGATTTTCATCACACCTCACCAGATCAAGCACATCAAGGACTTCAAGGACTACAAGTATTCTCACAGGGTGGATAAGAAGCCCAACCGCAAGCTGATCAATGACACCCTGTATAGCACACGGAAGGACGATAAGGGCAATACCCTGATCGTGAACAATCTGAACGGCCTGTACGACAAGGATAATGACAAGCTGAAGAAGCTGATCAACAAGTCTCCCGAGAAGCTGCTGATGTACCACCACGATCCTCAGACATATCAGAAGCTGAAGCTGATCATGGAGCAGTACGGCGACGAGAAGAACCCACTGTATAAGTACTATGAGGAGACAGGCAACTACCTGACAAAGTATAGCAAGAAGGATAATGGCCCCGTGATCAAGAAGATCAAGTACTATGGCAACAAGCTGAATGCCCACCTGGACATCACCGACGATTACCCTAACTCTCGCAATAAGGTGGTGAAGCTGAGCCTGAAGCCATACCGGTTCGACGTGTACCTGGACAACGGCGTGTATAAGTTTGTGACAGTGAAGAATCTGGATGTGATCAAGAAGGAGAACTACTATGAGGTGAACAGCAAGTGCTACGAGGAGGCCAAGAAGCTGAAGAAGATCAGCAACCAGGCCGAGTTCATCGCCTCTTTTTACAAGAATGACCTGATCAAGATCAATGGCGAGCTGTATAGAGTGATCGGCGTGAACAATGATCTGCTGAACAGAATCGAAGTGAATATGATCGACATCACCTACAGGGAGTATCTGGAGAACATGAATGATAAGAGGCCCCCTCATATCATCAAGACCATCGCCTCTAAGACACAGAGCATCAAGAAGTACAGCACAGACATCCTGGGGAACCTGTATGAAGTCAAGAGCAAGAAACATCCTCAGATTATCAAGAAAGGCSGGSKRTADGSEFEPKKKRKV

SEQ ID NO: 470 - protein, 2135 aa, Artificial Sequence
  Synthetic
MKRTADGSEFESPKKKRKVSEVEFSHEYWMRHALTLAKRAWDEREVPVGAVLVHNNRVIGEGWNRPIGRHDPTAHAEIMALRQGGLVMQNYRLIDATLYVTLEPCVMCAGAMIHSRIGRVVFGARDAKTGAAGSLMDVLHHPGMNHRVEITEGILADECAALLSDFFRMRRQEIKAQKKAQSSTDSGGSSGGSSGSETPGTSESATPESSGGSSGGSGTTGATGGAGCTCTGGGCCTTCTTCTGAGCATTGAACACCTGTCTAGGCATCCGATAGAAATCGCACAGCAGGGCGGCACATTCATCTGCCAGGATTCCCTCGGTAATTTCGACGCGGTGATTCATGCCGGGGTAGTTCAGCACGTTCATCAGGGAGCCTGCGGCGCCTCTTTTTGAGTTCCTCACGCCAAACACCACGCGGCCGATCCTAGAGTGGATCATGGCGCCGGCGCACATCACGCAAGGCTCGAATGTCACGTACAGGGTGGCGTCAATCAGTCTGTAGTTCTGCATGACCAGGCCGCCCTGTCTCAGGGCCATAATTTCGGCATGGGCTGTTGGGTCGTGCAGGCCGATGGCTCTGTTCCAGCCCTCGCCGATCACTCTATTGTTCAGCACCAGCACGGCTCCCACAGGCACCTCCCTCTCATCCCGTGCCCTCTTGGCCAGGGTCAGGGCATGTCTCATCCAGTACTCGTGGGAAAACTCCACCTCAGASGGSSGGSSGSETPGTSESATPESSGGSSGGSDKKYSIGLAIGTNSVGWAVITDEYKVPSKKFKVLGNTDRHSIKKNLIGALLFDSGETAEATRLKRTARRRYTRRKNRICYLQEIFSNEMAKVDDSFFHRLEESFLVEEDKKHERHPIFGNIVDEVAYHEKYPTIYHLRKKLVDSTDKADLRLIYLALAHMIKFRGHFLIEGDLNPDNSDVDKLFIQLVQTYNQLFEENPINASGVDAKAILSARLSKSRRLENLIAQLPGEKKNGLFGNLIALSLGLTPNFKSNFDLAEDAKLQLSKDTYDDDLDNLLAQIGDQYADLFLAAKNLSDAILLSDILRVNTEITKAPLSASMIKRYDEHHQDLTLLKALVRQQLPEKYKEIFFDQSKNGYAGYIDGGASQEEFYKFIKPILEKMDGTEELLVKLNREDLLRKQRTFDNGSIPHQIHLGELHAILRRQEDFYPFLKDNREKIEKILTFRIPYYVGPLARGNSRFAWMTRKSEETITPWNFEEVVDKGASAQSFIERMTNFDKNLPNEKVLPKHSLLYEYFTVYNELTKVKYVTEGMRKPAFLSGEQKKAIVDLLFKTNRKVTVKQLKEDYFKKIECFDSVEISGVEDRFNASLGTYHDLLKIIKDKDFLDNEENEDILEDIVLTLTLFEDREMIEERLKTYAHLFDDKVMKQLKRRRYTGWGRLSRKLINGIRDKQSGKTILDFLKSDGFANRNFMQLIHDDSLTFKEDIQKAQVSGQGDSLHEHIANLAGSPAIKKGILQTVKVVDELVKVMGRHKPENIVIEMARENQTTQKGQKNSRERMKRIEEGIKELGSQILKEHPVENTQLQNEKLYLYYLQNGRDMYVDQELDINRLSDYDVDHIVPQSFLKDDSIDNKVLTRSDKNRGKSDNVPSEEVVKKMKNYWRQLLNAKLITQRKFDNLTKAERGGLSELDKAGFIKRQLVETRQITKHVAQILDSRMNTKYDENDKLIREVKVITLKSKLVSDFRKDFQFYKVREINNYHHAHDAYLNAVVGTALIKKYPKLESEFVYGDYKVYDVRKMIAKSEQEIGKATAKYFFYSNIMNFFKTEITLANGEIRKRPLIETNGETGEIVWDKGRDFATVRKVLSMPQVNIVKKTEVQTGGFSKESIRPKRNSDKLIARKKDWDPKKYGGFVSPTVAYSVLVVAKVEKGKSKKLKSVKELLGITIMERSSFEKNPIDFLEAKGYKEVKKDLIIKLPKYSLFELENGRKRMLASARFLQKGNELALPSKYVNFLYLASHYEKLKGSPEDNEQKQLFVEQHKHYLDEIIEQISEFSKRVILADANLDKVLSAYNKHRDKPIREQAENIIHLFTLTNLGAPRAFKYFDTTIDRKVYRSTKEVLDATLIHQSITGLYETRIDLSQLGGDSGGSKRTADGSEFEPKKKRKV

SEQ ID NO: 471 - protein, 2155 aa, Artificial Sequence
  Synthetic
MKRTADGSEFESPKKKRKVSEVEFSHEYWMRHALTLAKRAWDEREVPVGAVLVHNNRVIGEGWNRPIGRHDPTAHAEIMALRQGGLVMQNYRLIDATLYVTLEPCVMCAGAMIHSRIGRVVFGARDAKTGAAGSLMDVLHHPGMNHRVEITEGILADECAALLSDFFRMRRQEIKAQKKAQSSTDSGGSSGGSSGSETPGTSESATPESSGGSSGGSGTTGATGGAGCTCTGGGCCTTCTTCTGAGCATTGAACACCTGTCTAGGCATCCGATAGAAATCGCACAGCAGGGCGGCACATTCATCTGCCAGGATTCCCTCGGTAATTTCGACGCGGTGATTCATGCCGGGGTAGTTCAGCACGTTCATCAGGGAGCCTGCGGCGCCTCTTTTTGAGTTCCTCACGCCAAACACCACGCGGCCGATCCTAGAGTGGATCATGGCGCCGGCGCACATCACGCAAGGCTCGAATGTCACGTACAGGGTGGCGTCAATCAGTCTGTAGTTCTGCATGACCAGGCCGCCCTGTCTCAGGGCCATAATTTCGGCATGGGCTGTTGGGTCGTGCAGGCCGATGGCTCTGTTCCAGCCCTCGCCGATCACTCTATTGTTCAGCACCAGCACGGCTCCCACAGGCACCTCCCTCTCATCCCGTGCCCTCTTGGCCAGGGTCAGGGCATGTCTCATCCAGTACTCGTGGGAAAACTCCACCTCAGASGGSSGGSSGSETPGTSESATPESSGGSSGGSNIMNFFKTEITLANGEIRKRPLIETNGETGEIVWDKGRDFATVRKVLSMPQVNIVKKTEVQTGGFSKESILPKRNSDKLIARKKDWDPKKYGGFDSPTVAYSVLVVAKVEKGKSKKLKSVKELLGITIMERSSFEKNPIDFLEAKGYKEVKKDLIIKLPKYSLFELENGRKRMLASAGELQKGNELALPSKYVNFLYLASHYEKLKGSPEDNEQKQLFVEQHKHYLDEIIEQISEFSKRVILADANLDKVLSAYNKHRDKPIREQAENIIHLFTLTNLGAPAAFKYFDTTIDRKRYTSTKEVLDATLIHQSITGLYETRIDLSQLGGDGGSGGSGGSGGSGGSGGSGGDKKYSIGLAIGTNSVGWAVITDEYKVPSKKFKVLGNTDRHSIKKNLIGALLFDSGETAEATRLKRTARRRYTRRKNRICYLQEIFSNEMAKVDDSFFHRLEESFLVEEDKKHERHPIFGNIVDEVAYHEKYPTIYHLRKKLVDSTDKADLRLIYLALAHMIKFRGHFLIEGDLNPDNSDVDKLFIQLVQTYNQLFEENPINASGVDAKAILSARLSKSRRLENLIAQLPGEKKNGLFGNLIALSLGLTPNFKSNFDLAEDAKLQLSKDTYDDDLDNLLAQIGDQYADLFLAAKNLSDAILLSDILRVNTEITKAPLSASMIKRYDEHHQDLTLLKALVRQQLPEKYKEIFFDQSKNGYAGYIDGGASQEEFYKFIKPILEKMDGTEELLVKLNREDLLRKQRTFDNGSIPHQIHLGELHAILRRQEDFYPFLKDNREKIEKILTFRIPYYVGPLARGNSRFAWMTRKSEETITPWNFEEVVDKGASAQSFIERMTNFDKNLPNEKVLPKHSLLYEYFTVYNELTKVKYVTEGMRKPAFLSGEQKKAIVDLLFKTNRKVTVKQLKEDYFKKIECFDSVEISGVEDRFNASLGTYHDLLKIIKDKDFLDNEENEDILEDIVLTLTLFEDREMIEERLKTYAHLFDDKVMKQLKRRRYTGWGRLSRKLINGIRDKQSGKTILDFLKSDGFANRNFMQLIHDDSLTFKEDIQKAQVSGQGDSLHEHIANLAGSPAIKKGILQTVKVVDELVKVMGRHKPENIVIEMARENQTTQKGQKNSRERMKRIEEGIKELGSQILKEHPVENTQLQNEKLYLYYLQNGRDMYVDQELDINRLSDYDVDHIVPQSFLKDDSIDNKVLTRSDKNRGKSDNVPSEEVVKKMKNYWRQLLNAKLITQRKFDNLTKAERGGLSELDKAGFIKRQLVETRQITKHVAQILDSRMNTKYDENDKLIREVKVITLKSKLVSDFRKDFQFYKVREINNYHHAHDAYLNAVVGTALIKKYPKLESEFVYGDYKVYDVRKMIAKSEQEIGKATAKYFFYSSGGSKRTADGSEFEPKKKRKV

SEQ ID NO: 472 - protein, 2156 aa, Artificial Sequence
  Synthetic
MKRTADGSEFESPKKKRKVSEVEFSHEYWMRHALTLAKRAWDEREVPVGAVLVHNNRVIGEGWNRPIGRHDPTAHAEIMALRQGGLVMQNYRLIDATLYVTLEPCVMCAGAMIHSRIGRVVFGARDAKTGAAGSLMDVLHHPGMNHRVEITEGILADECAALLSDFFRMRRQEIKAQKKAQSSTDSGGSSGGSSGSETPGTSESATPESSGGSSGGSGTTGATGGAGCTCTGGGCCTTCTTCTGAGCATTGAACACCTGTCTAGGCATCCGATAGAAATCGCACAGCAGGGCGGCACATTCATCTGCCAGGATTCCCTCGGTAATTTCGACGCGGTGATTCATGCCGGGGTAGTTCAGCACGTTCATCAGGGAGCCTGCGGCGCCTCTTTTTGAGTTCCTCACGCCAAACACCACGCGGCCGATCCTAGAGTGGATCATGGCGCCGGCGCACATCACGCAAGGCTCGAATGTCACGTACAGGGTGGCGTCAATCAGTCTGTAGTTCTGCATGACCAGGCCGCCCTGTCTCAGGGCCATAATTTCGGCATGGGCTGTTGGGTCGTGCAGGCCGATGGCTCTGTTCCAGCCCTCGCCGATCACTCTATTGTTCAGCACCAGCACGGCTCCCACAGGCACCTCCCTCTCATCCCGTGCCCTCTTGGCCAGGGTCAGGGCATGTCTCATCCAGTACTCGTGGGAAAACTCCACCTCAGASGGSSGGSSGSETPGTSESATPESSGGSSGGSEIGKATAKYFFYSNIMNFFKTEITLANGEIRKRPLIETNGETGEIVWDKGRDFATVRKVLSMPQVNIVKKTEVQTGGFSKESILPKRNSDKLIARKKDWDPKKYGGFDSPTVAYSVLVVAKVEKGKSKKLKSVKELLGITIMERSSFEKNPIDFLEAKGYKEVKKDLIIKLPKYSLFELENGRKRMLASAGELQKGNELALPSKYVNFLYLASHYEKLKGSPEDNEQKQLFVEQHKHYLDEIIEQISEFSKRVILADANLDKVLSAYNKHRDKPIREQAENIIHLFTLTNLGAPAAFKYFDTTIDRKRYTSTKEVLDATLIHQSITGLYETRIDLSQLGGDGGSGGSGGSGGSGGSGGSGGMDKKYSIGLAIGTNSVGWAVITDEYKVPSKKFKVLGNTDRHSIKKNLIGALLFDSGETAEATRLKRTARRRYTRRKNRICYLQEIFSNEMAKVDDSFFHRLEESFLVEEDKKHERHPIFGNIVDEVAYHEKYPTIYHLRKKLVDSTDKADLRLIYLALAHMIKFRGHFLIEGDLNPDNSDVDKLFIQLVQTYNQLFEENPINASGVDAKAILSARLSKSRRLENLIAQLPGEKKNGLFGNLIALSLGLTPNFKSNFDLAEDAKLQLSKDTYDDDLDNLLAQIGDQYADLFLAAKNLSDAILLSDILRVNTEITKAPLSASMIKRYDEHHQDLTLLKALVRQQLPEKYKEIFFDQSKNGYAGYIDGGASQEEFYKFIKPILEKMDGTEELLVKLNREDLLRKQRTFDNGSIPHQIHLGELHAILRRQEDFYPFLKDNREKIEKILTFRIPYYVGPLARGNSRFAWMTRKSEETITPWNFEEVVDKGASAQSFIERMTNFDKNLPNEKVLPKHSLLYEYFTVYNELTKVKYVTEGMRKPAFLSGEQKKAIVDLLFKTNRKVTVKQLKEDYFKKIECFDSVEISGVEDRFNASLGTYHDLLKIIKDKDFLDNEENEDILEDIVLTLTLFEDREMIEERLKTYAHLFDDKVMKQLKRRRYTGWGRLSRKLINGIRDKQSGKTILDFLKSDGFANRNFMQLIHDDSLTFKEDIQKAQVSGQGDSLHEHIANLAGSPAIKKGILQTVKVVDELVKVMGRHKPENIVIEMARENQTTQKGQKNSRERMKRIEEGIKELGSQILKEHPVENTQLQNEKLYLYYLQNGRDMYVDQELDINRLSDYDVDHIVPQSFLKDDSIDNKVLTRSDKNRGKSDNVPSEEVVKKMKNYWRQLLNAKLITQRKFDNLTKAERGGLSELDKAGFIKRQLVETRQITKHVAQILDSRMNTKYDENDKLIREVKVITLKSKLVSDFRKDFQFYKVREINNYHHAHDAYLNAVVGTALIKKYPKLESEFVYGDYKVYDVRKMIAKSEQSGGSKRTADGSEFEPKKKRKV

SEQ ID NO: 473 - protein, 1994 aa, Artificial Sequence
  Synthetic
MKRTADGSEFESPKKKRKVSEVEFSHEYWMRHALTLAKRAWDEREVPVGAVLVHNNRVIGEGWNRPIGRHDPTAHAEIMALRQGGLVMQNYRLIDATLYVTLEPCVMCAGAMIHSRIGRVVFGARDAKTGAAGSLMDVLHHPGMNHRVEITEGILADECAALLSDFFRMRRQEIKAQKKAQSSTDSGGSSGGSSGSETPGTSESATPESSGGSSGGSGTTGATGGAGCTCTGGGCCTTCTTCTGAGCATTGAACACCTGTCTAGGCATCCGATAGAAATCGCACAGCAGGGCGGCACATTCATCTGCCAGGATTCCCTCGGTAATTTCGACGCGGTGATTCATGCCGGGGTAGTTCAGCACGTTCATCAGGGAGCCTGCGGCGCCTCTTTTTGAGTTCCTCACGCCAAACACCACGCGGCCGATCCTAGAGTGGATCATGGCGCCGGCGCACATCACGCAAGGCTCGAATGTCACGTACAGGGTGGCGTCAATCAGTCTGTAGTTCTGCATGACCAGGCCGCCCTGTCTCAGGGCCATAATTTCGGCATGGGCTGTTGGGTCGTGCAGGCCGATGGCTCTGTTCCAGCCCTCGCCGATCACTCTATTGTTCAGCACCAGCACGGCTCCCACAGGCACCTCCCTCTCATCCCGTGCCCTCTTGGCCAGGGTCAGGGCATGTCTCATCCAGTACTCGTGGGAAAACTCCACCTCAGASGGSSGGSSGSETPGTSESATPESSGGSSGGSSKLEKFTNCYSLSKTLRFKAIPVGKTQENIDNKRLLVEDEKRAEDYKGVKKLLDRYYLSFINDVLHSIKLKNLNNYISLFRKKTRTEKENKELENLEINLRKEIAKAFKGNEGYKSLFKKDIIETILPEFLDDKDEIALVNSFNGFTTAFTGFFDNRENMFSEEAKSTSIAFRCINENLTRYISNMDIFEKVDAIFDKHEVQEIKEKILNSDYDVEDFFEGEFFNFVLTQEGIDVYNAIIGGFVTESGEKIKGLNEYINLYNQKTKQKLPKFKPLYKQVLSDRESLSFYGEGYTSDEEVLEVFRNTLNKNSEIFSSIKKLEKLFKNFDEYSSAGIFVKNGPAISTISKDIFGEWNVIRDKWNAEYDDIHLKKKAVVTEKYEDDRRKSFKKIGSFSLEQLQEYADADLSVVEKLKEIIIQKVDEIYKVYGSSEKLFDADFVLEKSLKKNDAVVAIMKDLLDSVKSFENYIKAFFGEGKETNRDESFYGDFVLAYDILLKVDHIYDAIRNYVTQKPYSKDKFKLYFQNPQFMGGWDKDKETDYRATILRYGSKYYLAIMDKKYAKCLQKIDKDDVNGNYEKINYKLLPGPNKMLPKVFFSKKWMAYYNPSEDIQKIYKNGTFKKGDMFNLNDCHKLIDFFKDSISRYPKWSNAYDFNFSETEKYKDIAGFYREVEEQGYKVSFESASKKEVDKLVEEGKLYMFQIYNKDFSDKSHGTPNLHTMYFKLLFDENNHGQIRLSGGAELFMRRASLKKEELVVHPANSPIANKNPDNPKKTTTLSYDVYKDKRFSEDQYELHIPIAINKCPKNIFKINTEVRVLLKHDDNPYVIGIARGERNLLYIVVVDGKGNIVEQYSLNEIINNFNGIRIKTDYHSLLDKKEKERFEARQNWTSIENIKELKAGYISQVVHKICELVEKYDAVIALEDLNSGFKNSRVKVEKQVYQKFEKMLIDKLNYMVDKKSNPCATGGALKGYQITNKFESFKSMSTQNGFIFYIPAWLTSKIDPSTGFVNLLKTKYTSIADSKKFISSFDRIMYVPEEDLFEFALDYKNFSRTDADYIKKWKLYSYGNRIRIFRNPKKNNVFDWEEVCLTSAYKELFNKYGINYQQGDIRALLCEQSDKAFYSSFMALMSLMLQMRNSITGRTDVDFLISPVKNSDGIFYDSRNYEAQENAILPKNADANGAYNIARKVLWAIGQFKKAEDEKLDKVKIAISNKEWLEYAQTSVKSGGSKRTADGSEFEPKKKRKV

SEQ ID NO: 474 - protein, 2135 aa, Artificial Sequence
  Synthetic
MKRTADGSEFESPKKKRKVSEVEFSHEYWMRHALTLAKRAWDEREVPVGAVLVHNNRVIGEGWNRPIGRHDPTAHAEIMALRQGGLVMQNYRLIDATLYVTLEPCVMCAGAMIHSRIGRVVFGARDAKTGAAGSLMDVLHHPGMNHRVEITEGILADECAALLSDFFRMRRQEIKAQKKAQSSTDSGGSSGGSSGSETPGTSESATPESSGGSSGGSGTTGATGGAGCTCTGGGCCTTCTTCTGAGCATTGAACACCTGTCTAGGCATCCGATAGAAATCGCACAGCAGGGCGGCACATTCATCTGCCAGGATTCCCTCGGTAATTTCGACGCGGTGATTCATGCCGGGGTAGTTCAGCACGTTCATCAGGGAGCCTGCGGCGCCTCTTTTTGAGTTCCTCACGCCAAACACCACGCGGCCGATCCTAGAGTGGATCATGGCGCCGGCGCACATCACGCAAGGCTCGAATGTCACGTACAGGGTGGCGTCAATCAGTCTGTAGTTCTGCATGACCAGGCCGCCCTGTCTCAGGGCCATAATTTCGGCATGGGCTGTTGGGTCGTGCAGGCCGATGGCTCTGTTCCAGCCCTCGCCGATCACTCTATTGTTCAGCACCAGCACGGCTCCCACAGGCACCTCCCTCTCATCCCGTGCCCTCTTGGCCAGGGTCAGGGCATGTCTCATCCAGTACTCGTGGGAAAACTCCACCTCAGASGGSSGGSSGSETPGTSESATPESSGGSSGGSDKKYSIGLAIGTNSVGWAVITDEYKVPSKKFKVLGNTDRHSIKKNLIGALLFDSGETAEATRLKRTARRRYTRRKNRICYLQEIFSNEMAKVDDSFFHRLEESFLVEEDKKHERHPIFGNIVDEVAYHEKYPTIYHLRKKLVDSTDKADLRLIYLALAHMIKFRGHFLIEGDLNPDNSDVDKLFIQLVQTYNQLFEENPINASGVDAKAILSARLSKSRRLENLIAQLPGEKKNGLFGNLIALSLGLTPNFKSNFDLAEDAKLQLSKDTYDDDLDNLLAQIGDQYADLFLAAKNLSDAILLSDILRVNTEITKAPLSASMIKRYDEHHQDLTLLKALVRQQLPEKYKEIFFDQSKNGYAGYIDGGASQEEFYKFIKPILEKMDGTEELLVKLNREDLLRKQRTFDNGSIPHQIHLGELHAILRRQEDFYPFLKDNREKIEKILTFRIPYYVGPLARGNSRFAWMTRKSEETITPWNFEEVVDKGASAQSFIERMTNFDKNLPNEKVLPKHSLLYEYFTVYNELTKVKYVTEGMRKPAFLSGEQKKAIVDLLFKTNRKVTVKQLKEDYFKKIECFDSVEISGVEDRFNASLGTYHDLLKIIKDKDFLDNEENEDILEDIVLTLTLFEDREMIEERLKTYAHLFDDKVMKQLKRRRYTGWGRLSRKLINGIRDKQSGKTILDFLKSDGFANRNFMQLIHDDSLTFKEDIQKAQVSGQGDSLHEHIANLAGSPAIKKGILQTVKVVDELVKVMGRHKPENIVIEMARENQTTQKGQKNSRERMKRIEEGIKELGSQILKEHPVENTQLQNEKLYLYYLQNGRDMYVDQELDINRLSDYDVDHIVPQSFLKDDSIDNKVLTRSDKNRGKSDNVPSEEVVKKMKNYWRQLLNAKLITQRKFDNLTKAERGGLSELDKAGFIKRQLVETRQITKHVAQILDSRMNTKYDENDKLIREVKVITLKSKLVSDFRKDFQFYKVREINNYHHAHDAYLNAVVGTALIKKYPKLESEFVYGDYKVYDVRKMIAKSEQEIGKATAKYFFYSNIMNFFKTEITLANGEIRKRPLIETNGETGEIVWDKGRDFATVRKVLSMPQVNIVKKTEVQTGGFSKESILPKRNSDKLIARKKDWDPKKYGGFVSPTVAYSVLVVAKVEKGKSKKLKSVKELLGITIMERSSFEKNPIDFLEAKGYKEVKKDLIIKLPKYSLFELENGRKRMLASARELQKGNELALPSKYVNFLYLASHYEKLKGSPEDNEQKQLFVEQHKHYLDEIIEQISEFSKRVILADANLDKVLSAYNKHRDKPIREQAENIIHLFTLTNLGAPAAFKYFDTTIDRKQYRSTKEVLDATLIHQSITGLYETRIDLSQLGGDSGGSKRTADGSEFEPKKKRKV

SEQ ID NO: 475 - DNA, 20 bp, Artificial Sequence
  Synthetic
ccttccagagattctggggc

SEQ ID NO: 476 - protein, 1866 aa, Artificial Sequence
  Synthetic
MKRTADGSEFESPKKKRKVSEVEFSHEYWMRHALTLAKRAWDEREVPVGAVLVHNNRVIGEGWNRPIGRHDPTAHAEIMALRQGGLVMQNYRLIDATLYVTLEPCVMCAGAMIHSRIGRVVFGARDAKTGAAGSLMDVLHHPGMNHRVEITEGILADECAALLSDFFRMRRQEIKAQKKAQSSTDSGGSSGGSSGSETPGTSESATPESSGGSSGGSGTTGATGGAGCTCTGGGCCTTCTTCTGAGCATTGAACACCTGTCTAGGCATCCGATAGAAATCGCACAGCAGGGCGGCACATTCATCTGCCAGGATTCCCTCGGTAATTTCGACGCGGTGATTCATGCCGGGGTAGTTCAGCACGTTCATCAGGGAGCCTGCGGCGCCTCTTTTTGAGTTCCTCACGCCAAACACCACGCGGCCGATCCTAGAGTGGATCATGGCGCCGGCGCACATCACGCAAGGCTCGAATGTCACGTACAGGGTGGCGTCAATCAGTCTGTAGTTCTGCATGACCAGGCCGCCCTGTCTCAGGGCCATAATTTCGGCATGGGCTGTTGGGTCGTGCAGGCCGATGGCTCTGTTCCAGCCCTCGCCGATCACTCTATTGTTCAGCACCAGCACGGCTCCCACAGGCACCTCCCTCTCATCCCGTGCCCTCTTGGCCAGGGTCAGGGCATGTCTCATCCAGTACTCGTGGGAAAACTCCACCTCAGASGGSSGGSSGSETPGTSESATPESSGGSSGGSDKKYSIGLDIGTNSVGWAVITDEYKVPSKKFKVLGNTDRHSIKKNLIGALLFDSGETAEATRLKRTARRRYTRRKNRICYLQEIFSNEMAKVDDSFFHRLEESFLVEEDKKHERHPIFGNIVDEVAYHEKYPTIYHLRKKLVDSTDKADLRLIYLALAHMIKFRGHFLIEGDLNPDNSDVDKLFIQLVQTYNQLFEENPINASGVDAKAILSARLSKSRRLENLIAQLPGEKKNGLFGNLIALSLGLTPNFKSNFDLAEDAKLQLSKDTYDDDLDNLLAQIGDQYADLFLAAKNLSDAILLSDILRVNTEITKAPLSASMIKRYDEHHQDLTLLKALVRQQLPEKYKEIFFDQSKNGYAGYIDGGASQEEFYKFIKPILEKMDGTEELLVKLNREDLLRKQRTFDNGSIPHQIHLGELHAILRRQEDFYPFLKDNREKIEKILTFRIPYYVGPLARGNSRFAWMTRKSEETITPWNFEEVVDKGASAQSFIERMTNFDKNLPNEKVLPKHSLLYEYFTVYNELTKVKYVTEGMRKPAFLSGEQKKAIVDLLFKTNRKVTVKQLKEDYFKKIECFDSVEISGVEDRFNASLGTYHDLLKIIKDKDFLDNEENEDILEDIVLTLTLFEDREMIEERLKTYAHLFDDKVMKQLKRRRYTGWGRLSRKLINGIRDKQSGKTILDFLKSDGFANRNFMQLIHDDSLTFKEDIQKAQVSGQGDSLHEHIANLAGSPAIKKGILQTVKVVDELVKVMGRHKPENIVIEMARENQTTQKGQKNSRERMKRIEEGIKELGSQILKEHPVENTQLQNEKLYLYYLQNGRDMYVDQELDINRLSDYDVDHIVPQSFLKDDSIDNKVLTRSDKNRGKSDNVPSEEVVKKMKNYWRQLLNAKLITQRKFDNLTKAERGGLSELDKAGFIKRQLVETRQITKHVAQILDSRMNTKYDENDKLIREVKVITLKSKLVSDFRKDFQFYKVREINNYHHAHDAYLNAVVGTALIKKYPKLESEFVYGDYKVYDVRKMIAKSEQEIGKATAKYFFYSNIMNFFKTEITLANGEIRKRPLIETNGETGEIVWDKGRDFATVRKVLSMPQVNIVKKTESGGSKRTADGSEFEPKKKRKV

SEQ ID NO: 477 - DNA, 20 bp, Artificial Sequence
  Synthetic
ccagccggtgcagggtgccc

SEQ ID NO: 478 - DNA, 20 bp, Artificial Sequence
  Synthetic
cagcggtacagggtgaccac

SEQ ID NO: 479 - DNA, 20 bp, Artificial Sequence
  Synthetic
tgtccaggcaggaggccagg

SEQ ID NO: 480 - DNA, 20 bp, Artificial Sequence
  Synthetic
tgcccttgtgcacaatgccc

SEQ ID NO: 481 - DNA, 20 bp, Artificial Sequence
  Synthetic
ccaaatttggatgttttcaa

SEQ ID NO: 482 - DNA, 20 bp, Artificial Sequence
  Synthetic
ctcggacaaagttcgggctc

SEQ ID NO: 483 - DNA, 20 bp, Artificial Sequence
  Synthetic
caatgcagagtgaggttggt

SEQ ID NO: 484 - DNA, 20 bp, Artificial Sequence
  Synthetic
acgggattttttcatttctg

SEQ ID NO: 485 - DNA, 20 bp, Artificial Sequence
  Synthetic
aaaattcgcaagtatgtctt

SEQ ID NO: 486 - DNA, 20 bp, Artificial Sequence
  Synthetic
cattgatgctggcgcccggc

SEQ ID NO: 487 - DNA, 20 bp, Artificial Sequence
  Synthetic
atgtaatacacactgattgc

SEQ ID NO: 488 - DNA, 20 bp, Artificial Sequence
  Synthetic
ctgaagctggtctgacctca

SEQ ID NO: 489 - DNA, 20 bp, Artificial Sequence
  Synthetic
acactaattcctatgaatgt

SEQ ID NO: 490 - DNA, 20 bp, Artificial Sequence
  Synthetic
gaaatacgatggggcgctca

SEQ ID NO: 491 - DNA, 20 bp, Artificial Sequence
  Synthetic
gaagcagaggcggtaggcgt

SEQ ID NO: 492 - DNA, 20 bp, Artificial Sequence
  Synthetic
gcttccgaggctgcaccgca

SEQ ID NO: 493 - DNA, 20 bp, Artificial Sequence
  Synthetic
tggaatccttttatatttag

SEQ ID NO: 494 - DNA, 20 bp, Artificial Sequence
  Synthetic
gtccgcaacgggctaatcca

SEQ ID NO: 495 - DNA, 20 bp, Artificial Sequence
  Synthetic
gggttttacgaccagcagcg

SEQ ID NO: 496 - DNA, 20 bp, Artificial Sequence
  Synthetic
tcccacggaatcctccagat

SEQ ID NO: 497 - DNA, 20 bp, Artificial Sequence
  Synthetic
cagctaccggacgctggacc

SEQ ID NO: 498 - DNA, 20 bp, Artificial Sequence
  Synthetic
tccgggagatgaaatgggat

SEQ ID NO: 499 - DNA, 20 bp, Artificial Sequence
  Synthetic
tcccgctggacggctccgag

SEQ ID NO: 500 - DNA, 20 bp, Artificial Sequence
  Synthetic
ggacaatccggtggagcgcc

SEQ ID NO: 501 - DNA, 20 bp, Artificial Sequence
  Synthetic
aggagcgctatttagcatcg

SEQ ID NO: 502 - DNA, 20 bp, Artificial Sequence
  Synthetic
caccattggccgcacactgg

SEQ ID NO: 503 - DNA, 20 bp, Artificial Sequence
  Synthetic
aataggagcaggggctcagc

SEQ ID NO: 504 - DNA, 20 bp, Artificial Sequence
  Synthetic
cttgttacagtaatagctgt

SEQ ID NO: 505 - DNA, 20 bp, Artificial Sequence
  Synthetic
agcgtggggtatgccgttgt

SEQ ID NO: 506 - DNA, 20 bp, Artificial Sequence
  Synthetic
aaagtaccggatgaccctct

SEQ ID NO: 507 - DNA, 20 bp, Artificial Sequence
  Synthetic
gccgaacgcatcaacactgc

SEQ ID NO: 508 - DNA, 20 bp, Artificial Sequence
  Synthetic
ctccatggtgtgggcgcagg

SEQ ID NO: 509 - DNA, 20 bp, Artificial Sequence
  Synthetic
ccctgtctttggcagcgaaa

SEQ ID NO: 510 - DNA, 20 bp, Artificial Sequence
  Synthetic
attttggtacctttgtcccc

SEQ ID NO: 511 - DNA, 20 bp, Artificial Sequence
  Synthetic
cagcagagcttgcggcgccg

SEQ ID NO: 512 - DNA, 20 bp, Artificial Sequence
  Synthetic
atccattcctgaatggaaca

SEQ ID NO: 513 - DNA, 20 bp, Artificial Sequence
  Synthetic
gaggtactcggcagatcctt

SEQ ID NO: 514 - DNA, 20 bp, Artificial Sequence
  Synthetic
tgtacaggccacattgagat

SEQ ID NO: 515 - DNA, 20 bp, Artificial Sequence
  Synthetic
agtcagtacctgcctgccca

SEQ ID NO: 516 - DNA, 20 bp, Artificial Sequence
  Synthetic
atagacagtggctgcacttc

SEQ ID NO: 517 - DNA, 20 bp, Artificial Sequence
  Synthetic
gacaggcccatgaaaaccag

SEQ ID NO: 518 - DNA, 20 bp, Artificial Sequence
  Synthetic
tccggaggaggtgaaggcca

SEQ ID NO: 519 - DNA, 20 bp, Artificial Sequence
  Synthetic
atagcggatcagggagaagt

SEQ ID NO: 520 - DNA, 20 bp, Artificial Sequence
  Synthetic
tacccggatatcaagaactt

SEQ ID NO: 521 - DNA, 20 bp, Artificial Sequence
  Synthetic
tagagctctgcttgaaacat

SEQ ID NO: 522 - DNA, 20 bp, Artificial Sequence
  Synthetic
cggagggtgaggagtgcagg

SEQ ID NO: 523 - DNA, 20 bp, Artificial Sequence
  Synthetic
ggcgatgtcatcacctttga

SEQ ID NO: 524 - DNA, 20 bp, Artificial Sequence
  Synthetic
agtggccgtacagggagatt

SEQ ID NO: 525 - DNA, 20 bp, Artificial Sequence
  Synthetic
gtcgagacgctggccagcta

SEQ ID NO: 526 - DNA, 20 bp, Artificial Sequence
  Synthetic
gtgacggtgagctctgcaaa

SEQ ID NO: 527 - DNA, 20 bp, Artificial Sequence
  Synthetic
tttctaccgcagcaggctac

SEQ ID NO: 528 - DNA, 20 bp, Artificial Sequence
  Synthetic
gcaggtacctggggggcgcc

SEQ ID NO: 529 - DNA, 20 bp, Artificial Sequence
  Synthetic
gtggagacggacgctgcacc

SEQ ID NO: 530 - DNA, 20 bp, Artificial Sequence
  Synthetic
gtagtaccgtgggtactcga

SEQ ID NO: 531 - DNA, 20 bp, Artificial Sequence
  Synthetic
tgtttctaacgggaccactg

SEQ ID NO: 532 - DNA, 20 bp, Artificial Sequence
  Synthetic
ggaattccgggagatgaaat

SEQ ID NO: 533 - DNA, 20 bp, Artificial Sequence
  Synthetic
ccaccgtggtttacaccgac

SEQ ID NO: 534 - DNA, 20 bp, Artificial Sequence
  Synthetic
acggcactgggggtcttgtt

SEQ ID NO: 535 - DNA, 20 bp, Artificial Sequence
  Synthetic
gttcccagtgggcacagagg

SEQ ID NO: 536 - DNA, 20 bp, Artificial Sequence
  Synthetic
aaggcgtggggaagcattaa

SEQ ID NO: 537 - DNA, 20 bp, Artificial Sequence
  Synthetic
tgagccggtgggcccaatgc

SEQ ID NO: 538 - DNA, 20 bp, Artificial Sequence
  Synthetic
aggtcgtgtaaaatggataa

SEQ ID NO: 539 - DNA, 20 bp, Artificial Sequence
  Synthetic
tatgaccggcggctggagcc

SEQ ID NO: 540 - DNA, 20 bp, Artificial Sequence
  Synthetic
ctacaattcctacctgtccg

SEQ ID NO: 541 - DNA, 20 bp, Artificial Sequence
  Synthetic
gttgaatctgtgtgtaaacg

SEQ ID NO: 542 - DNA, 20 bp, Artificial Sequence
  Synthetic
acactgagtggtacaagaac

SEQ ID NO: 543 - DNA, 20 bp, Artificial Sequence
  Synthetic
actaacctggggctgccctt

SEQ ID NO: 544 - DNA, 20 bp, Artificial Sequence
  Synthetic
gattaccatccctccattcc

SEQ ID NO: 545 - DNA, 20 bp, Artificial Sequence
  Synthetic
ttcactgtggtcattttcct

SEQ ID NO: 546 - DNA, 20 bp, Artificial Sequence
  Synthetic
gcatgtcctacatcccgcag

SEQ ID NO: 547 - DNA, 20 bp, Artificial Sequence
  Synthetic
tacagacgtgaatgcttccc

SEQ ID NO: 548 - DNA, 20 bp, Artificial Sequence
  Synthetic
gaaaccgtagaggcagctgc

SEQ ID NO: 549 - DNA, 20 bp, Artificial Sequence
  Synthetic
gaaatagtacctttcttgaa

SEQ ID NO: 550 - DNA, 20 bp, Artificial Sequence
  Synthetic
agacgatggggggccgcagc

SEQ ID NO: 551 - DNA, 20 bp, Artificial Sequence
  Synthetic
ggtgttgctggaatggagaa

SEQ ID NO: 552 - DNA, 20 bp, Artificial Sequence
  Synthetic
cctgaaaagcccaaactccc

SEQ ID NO: 553 - DNA, 20 bp, Artificial Sequence
  Synthetic
gtacgtgcctgtgaacggca

SEQ ID NO: 554 - DNA, 20 bp, Artificial Sequence
  Synthetic
aacctcatgggattcaactg

SEQ ID NO: 555 - DNA, 20 bp, Artificial Sequence
  Synthetic
aacgtgaaagagatgcctgt

SEQ ID NO: 556 - DNA, 20 bp, Artificial Sequence
  Synthetic
gtgctgccgggcatattttc

SEQ ID NO: 557 - DNA, 20 bp, Artificial Sequence
  Synthetic
cgacaggcccatgaaaacca

SEQ ID NO: 558 - DNA, 20 bp, Artificial Sequence
  Synthetic
accggacatcctcagtgccg

SEQ ID NO: 559 - DNA, 20 bp, Artificial Sequence
  Synthetic
taactgtgcccatggccatt

SEQ ID NO: 560 - DNA, 20 bp, Artificial Sequence
  Synthetic
cagggctgaggggagaggac

SEQ ID NO: 561 - DNA, 20 bp, Artificial Sequence
  Synthetic
gacgcgggcgaccgggtaag

SEQ ID NO: 562 - DNA, 20 bp, Artificial Sequence
  Synthetic
gatcatgccgtcgtacaagg

SEQ ID NO: 563 - DNA, 20 bp, Artificial Sequence
  Synthetic
gaacgctgtccaccgtggag

SEQ ID NO: 564 - DNA, 20 bp, Artificial Sequence
  Synthetic
gagtttcgctcttgtcgccc

SEQ ID NO: 565 - DNA, 20 bp, Artificial Sequence
  Synthetic
gctgtcctctccagctccag

SEQ ID NO: 566 - DNA, 20 bp, Artificial Sequence
  Synthetic
tctgcgggcagctggtcttc

SEQ ID NO: 567 - DNA, 20 bp, Artificial Sequence
  Synthetic
gacagaaagtggtagcaaag

SEQ ID NO: 568 - DNA, 20 bp, Artificial Sequence
  Synthetic
acgtttctgctgatcgtgct

SEQ ID NO: 569 - DNA, 20 bp, Artificial Sequence
  Synthetic
ctgtgtgcgccagggctgtg

SEQ ID NO: 570 - DNA, 20 bp, Artificial Sequence
  Synthetic
tggaagatctatgaggaatg

SEQ ID NO: 571 - DNA, 20 bp, Artificial Sequence
  Synthetic
tcaagcggttcaagggcaaa

SEQ ID NO: 572 - DNA, 20 bp, Artificial Sequence
  Synthetic
atcactgctgacggtggagt

SEQ ID NO: 573 - DNA, 20 bp, Artificial Sequence
  Synthetic
tatctgtgcgagggtgctcg

SEQ ID NO: 574 - DNA, 20 bp, Artificial Sequence
  Synthetic
aaccgaaggctggtggccac

SEQ ID NO: 575 - DNA, 20 bp, Artificial Sequence
  Synthetic
ggcgggtagagggtctgcag

SEQ ID NO: 576 - DNA, 20 bp, Artificial Sequence
  Synthetic
tgccggagggtgaggagtgc

SEQ ID NO: 577 - DNA, 20 bp, Artificial Sequence
  Synthetic
aaggactccccttgcaataa

SEQ ID NO: 578 - DNA, 20 bp, Artificial Sequence
  Synthetic
aaaacgtgttggtgcttgag

SEQ ID NO: 579 - DNA, 20 bp, Artificial Sequence
  Synthetic
tttggttggccctgttggct

SEQ ID NO: 580 - DNA, 20 bp, Artificial Sequence
  Synthetic
gacgaggatctctagggtgg

SEQ ID NO: 581 - DNA, 20 bp, Artificial Sequence
  Synthetic
tccgagtcagatctgcaatc

SEQ ID NO: 582 - DNA, 20 bp, Artificial Sequence
  Synthetic
cacagtgggcaagacctctc

SEQ ID NO: 583 - DNA, 20 bp, Artificial Sequence
  Synthetic
aagtagcataaatttgtgca

SEQ ID NO: 584 - DNA, 20 bp, Artificial Sequence
  Synthetic
aaacagaaagcggacaatca

SEQ ID NO: 585 - DNA, 20 bp, Artificial Sequence
  Synthetic
tcaccgagaaggtgcctctt

SEQ ID NO: 586 - DNA, 20 bp, Artificial Sequence
  Synthetic
atcgcggactacaacatcat

SEQ ID NO: 587 - DNA, 20 bp, Artificial Sequence
  Synthetic
aagtatgtgcggagcgcctc

SEQ ID NO: 588 - DNA, 20 bp, Artificial Sequence
  Synthetic
tggggcttcctctcgggccg

SEQ ID NO: 589 - DNA, 20 bp, Artificial Sequence
  Synthetic
acggtagtaagtagccacat

SEQ ID NO: 590 - DNA, 20 bp, Artificial Sequence
  Synthetic
ctgtgaagacttcgaacagc

SEQ ID NO: 591 - DNA, 20 bp, Artificial Sequence
  Synthetic
gaggtgcgcaggcgcgtgtg

SEQ ID NO: 592 - DNA, 20 bp, Artificial Sequence
  Synthetic
gtagaagcagattttctgcc

SEQ ID NO: 593 - DNA, 20 bp, Artificial Sequence
  Synthetic
ggctaagggccacggcaaga

SEQ ID NO: 594 - DNA, 20 bp, Artificial Sequence
  Synthetic
gctgaactgcagggggcatg

SEQ ID NO: 595 - DNA, 20 bp, Artificial Sequence
  Synthetic
agagcaagcgtagacagccg

SEQ ID NO: 596 - DNA, 20 bp, Artificial Sequence
  Synthetic
tacgtgcctgtgaacggcaa

SEQ ID NO: 597 - DNA, 20 bp, Artificial Sequence
  Synthetic
gtgcggaagaaaaactcagt

SEQ ID NO: 598 - DNA, 20 bp, Artificial Sequence
  Synthetic
gaacgtgaaagagatgcctg

SEQ ID NO: 599 - DNA, 20 bp, Artificial Sequence
  Synthetic
ccaatgtcactgtggtggac

SEQ ID NO: 600 - DNA, 20 bp, Artificial Sequence
  Synthetic
gaaaacgtgttggtgcttga

SEQ ID NO: 601 - DNA, 20 bp, Artificial Sequence
  Synthetic
ctgcgtgactccgactggac

SEQ ID NO: 602 - DNA, 20 bp, Artificial Sequence
  Synthetic
cggactacaacatcattggc

SEQ ID NO: 603 - DNA, 20 bp, Artificial Sequence
  Synthetic
acagatggaagctatctgaa

SEQ ID NO: 604 - DNA, 20 bp, Artificial Sequence
  Synthetic
tggatacgtcccagtatttt

SEQ ID NO: 605 - DNA, 20 bp, Artificial Sequence
  Synthetic
tgcagtaggtacgcggcggc

SEQ ID NO: 606 - DNA, 20 bp, Artificial Sequence
  Synthetic
cccggatatcaagaactttg

SEQ ID NO: 607 - DNA, 20 bp, Artificial Sequence
  Synthetic
accgtacaaaaggacagcag

SEQ ID NO: 608 - DNA, 20 bp, Artificial Sequence
  Synthetic
catgcttctgctgatcgtgc

SEQ ID NO: 609 - DNA, 20 bp, Artificial Sequence
  Synthetic
agaagcagaggcggtaggcg

SEQ ID NO: 610 - DNA, 20 bp, Artificial Sequence
  Synthetic
tctggccggaccgaggaacc

SEQ ID NO: 611 - DNA, 20 bp, Artificial Sequence
  Synthetic
ggaggcaaacgggttccttg

SEQ ID NO: 612 - DNA, 20 bp, Artificial Sequence
  Synthetic
cggccggaagttcgagaagc

SEQ ID NO: 613 - DNA, 20 bp, Artificial Sequence
  Synthetic
ttccgggccgggaccgtgat

SEQ ID NO: 614 - DNA, 20 bp, Artificial Sequence
  Synthetic
tacactgggtgatcctgcaa

SEQ ID NO: 615 - DNA, 20 bp, Artificial Sequence
  Synthetic
ggttttacgaccagcagcga

SEQ ID NO: 616 - DNA, 20 bp, Artificial Sequence
  Synthetic
tgttgaggacggaagagcag

SEQ ID NO: 617 - DNA, 20 bp, Artificial Sequence
  Synthetic
cacgtgcaacctggcctttg

SEQ ID NO: 618 - DNA, 20 bp, Artificial Sequence
  Synthetic
ttcttcgcggactgcaaaca

SEQ ID NO: 619 - DNA, 20 bp, Artificial Sequence
  Synthetic
gacggaagaaggatgggcag

SEQ ID NO: 620 - DNA, 20 bp, Artificial Sequence
  Synthetic
tccgggtgtcatcagcttgt

SEQ ID NO: 621 - DNA, 20 bp, Artificial Sequence
  Synthetic
ctcaacggtacttgtgagcc

SEQ ID NO: 622 - DNA, 20 bp, Artificial Sequence
  Synthetic
ccgttcttcaggcccatcat

SEQ ID NO: 623 - DNA, 20 bp, Artificial Sequence
  Synthetic
aagcaagttttggtttcatt

SEQ ID NO: 624 - DNA, 20 bp, Artificial Sequence
  Synthetic
tgtggtggaccggctgtcac

SEQ ID NO: 625 - DNA, 20 bp, Artificial Sequence
  Synthetic
ggcgctgctgctgaagatgc

SEQ ID NO: 626 - DNA, 20 bp, Artificial Sequence
  Synthetic
ccgtataggccacattgaga

SEQ ID NO: 627 - DNA, 20 bp, Artificial Sequence
  Synthetic
acgggcaaagaaggtgtcca

SEQ ID NO: 628 - DNA, 20 bp, Artificial Sequence
  Synthetic
acagtgcctgcacccagcgc

SEQ ID NO: 629 - DNA, 20 bp, Artificial Sequence
  Synthetic
ctggtggcaacagacccgtc

SEQ ID NO: 630 - DNA, 20 bp, Artificial Sequence
  Synthetic
gagcgtggggtatgccgttg

SEQ ID NO: 631 - DNA, 20 bp, Artificial Sequence
  Synthetic
aaagaacctgtagatcaaag

SEQ ID NO: 632 - DNA, 20 bp, Artificial Sequence
  Synthetic
aggtagattccaatggcttc

SEQ ID NO: 633 - DNA, 20 bp, Artificial Sequence
  Synthetic
gtaagtgctgaccaaattac

SEQ ID NO: 634 - DNA, 20 bp, Artificial Sequence
  Synthetic
aagcatgtgtggagcgcctc

SEQ ID NO: 635 - DNA, 20 bp, Artificial Sequence
  Synthetic
aggtcactagacatgaataa

SEQ ID NO: 636 - DNA, 20 bp, Artificial Sequence
  Synthetic
cgatggttggcggtttagac

SEQ ID NO: 637 - DNA, 20 bp, Artificial Sequence
  Synthetic
agctgaatttgtgtgtaaac

SEQ ID NO: 638 - DNA, 20 bp, Artificial Sequence
  Synthetic
acacagttctcaaacactgt

SEQ ID NO: 639 - DNA, 20 bp, Artificial Sequence
  Synthetic
cactgatgtgctccagggtc

SEQ ID NO: 640 - DNA, 20 bp, Artificial Sequence
  Synthetic
catccattcctgaatggaac

SEQ ID NO: 641 - DNA, 20 bp, Artificial Sequence
  Synthetic
catcatgcccatcctggaag

SEQ ID NO: 642 - DNA, 20 bp, Artificial Sequence
  Synthetic
tcattgtcgtaggtaaagaa

SEQ ID NO: 643 - DNA, 20 bp, Artificial Sequence
  Synthetic
aagtcacagtgcacggcaca

SEQ ID NO: 644 - DNA, 20 bp, Artificial Sequence
  Synthetic
gaaggagacggcctccatga

SEQ ID NO: 645 - DNA, 20 bp, Artificial Sequence
  Synthetic
gcaaggtgaggtggtgacaa

SEQ ID NO: 646 - DNA, 20 bp, Artificial Sequence
  Synthetic
tttggcacgaatgaaaaggt

SEQ ID NO: 647 - DNA, 20 bp, Artificial Sequence
  Synthetic
agagggaaacctttcatcag

SEQ ID NO: 648 - DNA, 20 bp, Artificial Sequence
  Synthetic
gtgtagcgtatgcttccagg

SEQ ID NO: 649 - DNA, 20 bp, Artificial Sequence
  Synthetic
aaactggcccttatacctgt

SEQ ID NO: 650 - DNA, 20 bp, Artificial Sequence
  Synthetic
gatcactggtaactcagtag

SEQ ID NO: 651 - DNA, 20 bp, Artificial Sequence
  Synthetic
atatgcgcatctgtggaccc

SEQ ID NO: 652 - DNA, 20 bp, Artificial Sequence
  Synthetic
ggaaatactgaaagcaaaga

SEQ ID NO: 653 - DNA, 20 bp, Artificial Sequence
  Synthetic
tgtgtgccggcccatcactt

SEQ ID NO: 654 - DNA, 20 bp, Artificial Sequence
  Synthetic
cggcactgggggtcttgttc

SEQ ID NO: 655 - DNA, 20 bp, Artificial Sequence
  Synthetic
ccaggcggtccgcaaggccc

SEQ ID NO: 656 - DNA, 20 bp, Artificial Sequence
  Synthetic
ctgtggtggactggctgtca

SEQ ID NO: 657 - DNA, 20 bp, Artificial Sequence
  Synthetic
caccatcgatgtggccccct

SEQ ID NO: 658 - DNA, 20 bp, Artificial Sequence
  Synthetic
gtacctgcactgggctgact

SEQ ID NO: 659 - DNA, 20 bp, Artificial Sequence
  Synthetic
caggcaactggtttaagaac

SEQ ID NO: 660 - DNA, 20 bp, Artificial Sequence
  Synthetic
tagtaccgtgggtactcgaa

SEQ ID NO: 661 - DNA, 20 bp, Artificial Sequence
  Synthetic
ggggccgtgacgaccagccc

SEQ ID NO: 662 - DNA, 20 bp, Artificial Sequence
  Synthetic
gaggtgagcaatctgtcagc

SEQ ID NO: 663 - DNA, 20 bp, Artificial Sequence
  Synthetic
tgttgttactggaattagtt

SEQ ID NO: 664 - DNA, 20 bp, Artificial Sequence
  Synthetic
gctggtactcgtaatccggg

SEQ ID NO: 665 - DNA, 20 bp, Artificial Sequence
  Synthetic
acagaaagtggtagcaaagc

SEQ ID NO: 666 - DNA, 20 bp, Artificial Sequence
  Synthetic
cttccgggccgggaccgtga

SEQ ID NO: 667 - DNA, 20 bp, Artificial Sequence
  Synthetic
gatggttccgctccaggacc

SEQ ID NO: 668 - DNA, 20 bp, Artificial Sequence
  Synthetic
agaaggaacgctgtccaccg

SEQ ID NO: 669 - DNA, 20 bp, Artificial Sequence
  Synthetic
acgtgaatgcttccctggac

SEQ ID NO: 670 - DNA, 20 bp, Artificial Sequence
  Synthetic
tttgtctgacaacaatacat

SEQ ID NO: 671 - DNA, 20 bp, Artificial Sequence
  Synthetic
gctggaatggagaatggcct

SEQ ID NO: 672 - DNA, 20 bp, Artificial Sequence
  Synthetic
aggagaacttctggatttgc

SEQ ID NO: 673 - DNA, 20 bp, Artificial Sequence
  Synthetic
gtgcctcatcaagctaccca

SEQ ID NO: 674 - DNA, 20 bp, Artificial Sequence
  Synthetic
atcccggacagcttccccaa

SEQ ID NO: 675 - DNA, 20 bp, Artificial Sequence
  Synthetic
atgcttctgctgatcgtgct

SEQ ID NO: 676 - DNA, 20 bp, Artificial Sequence
  Synthetic
cacctgtgacggctctgagg

SEQ ID NO: 677 - DNA, 20 bp, Artificial Sequence
  Synthetic
ttacgcaatggaacgcccga

SEQ ID NO: 678 - DNA, 20 bp, Artificial Sequence
  Synthetic
agtaccgtgggtactcgaag

SEQ ID NO: 679 - DNA, 20 bp, Artificial Sequence
  Synthetic
cctcgtagtaaatccagttc

SEQ ID NO: 680 - DNA, 20 bp, Artificial Sequence
  Synthetic
ccatgtggtggaagagatat

SEQ ID NO: 681 - DNA, 20 bp, Artificial Sequence
  Synthetic
caaggtccgtgtcttttcct

SEQ ID NO: 682 - DNA, 20 bp, Artificial Sequence
  Synthetic
tcaacggtacttgtgagcca

SEQ ID NO: 683 - DNA, 20 bp, Artificial Sequence
  Synthetic
aaccggttctacacgcgagc

SEQ ID NO: 684 - DNA, 20 bp, Artificial Sequence
  Synthetic
tggaatagcgtttgccacag

SEQ ID NO: 685 - DNA, 20 bp, Artificial Sequence
  Synthetic
tgacggaggggatggcgcct

SEQ ID NO: 686 - DNA, 20 bp, Artificial Sequence
  Synthetic
caggaccagcatcatccccc

SEQ ID NO: 687 - DNA, 20 bp, Artificial Sequence
  Synthetic
agcgggcaaggtggcagaga

SEQ ID NO: 688 - DNA, 20 bp, Artificial Sequence
  Synthetic
tgtcactgaagaccccgagc

SEQ ID NO: 689 - DNA, 20 bp, Artificial Sequence
  Synthetic
ttccggggggcctcagggcg

SEQ ID NO: 690 - DNA, 20 bp, Artificial Sequence
  Synthetic
gcaggtgaaccgtttcccct

SEQ ID NO: 691 - DNA, 20 bp, Artificial Sequence
  Synthetic
tatgaacgttggtgtccctt

SEQ ID NO: 692 - DNA, 20 bp, Artificial Sequence
  Synthetic
agttgtcccaatacctgctt

SEQ ID NO: 693 - DNA, 20 bp, Artificial Sequence
  Synthetic
ctgcttcgcgggcacggctg

SEQ ID NO: 694 - DNA, 20 bp, Artificial Sequence
  Synthetic
tctggtgggcacgcagcagc

SEQ ID NO: 695 - DNA, 20 bp, Artificial Sequence
  Synthetic
cattccgttctcagttttcc

SEQ ID NO: 696 - DNA, 20 bp, Artificial Sequence
  Synthetic
ggtacctgcactgggctgac

SEQ ID NO: 697 - DNA, 20 bp, Artificial Sequence
  Synthetic
caagcggttcaagggcaaat

SEQ ID NO: 698 - DNA, 20 bp, Artificial Sequence
  Synthetic
tgatctcttgggagaagaac

SEQ ID NO: 699 - DNA, 20 bp, Artificial Sequence
  Synthetic
ggtgacctacccggactcag

SEQ ID NO: 700 - DNA, 20 bp, Artificial Sequence
  Synthetic
attccaatggcttctgggtc

SEQ ID NO: 701 - DNA, 20 bp, Artificial Sequence
  Synthetic
acgatgagcgcagcgaaatt

SEQ ID NO: 702 - DNA, 20 bp, Artificial Sequence
  Synthetic
tgaggctggtgtcaatcctt

SEQ ID NO: 703 - DNA, 20 bp, Artificial Sequence
  Synthetic
gttttacagagatcccttcc

SEQ ID NO: 704 - DNA, 20 bp, Artificial Sequence
  Synthetic
tgggccggggccttctgggc

SEQ ID NO: 705 - DNA, 20 bp, Artificial Sequence
  Synthetic
aagcagattttctgccaggt

SEQ ID NO: 706 - DNA, 20 bp, Artificial Sequence
  Synthetic
agctgtgcgatgaagcaggc

SEQ ID NO: 707 - DNA, 20 bp, Artificial Sequence
  Synthetic
gatcactggcaattcagtgg

SEQ ID NO: 708 - DNA, 20 bp, Artificial Sequence
  Synthetic
gaggacgaggatctctaggg

SEQ ID NO: 709 - DNA, 20 bp, Artificial Sequence
  Synthetic
caccgtggaactggcccaac

SEQ ID NO: 710 - DNA, 20 bp, Artificial Sequence
  Synthetic
cttcacggtgtgggcgcagg

SEQ ID NO: 711 - DNA, 20 bp, Artificial Sequence
  Synthetic
cacgtttctgctgatcgtgc

SEQ ID NO: 712 - DNA, 20 bp, Artificial Sequence
  Synthetic
ggcaggtctcattgaaggta

SEQ ID NO: 713 - DNA, 20 bp, Artificial Sequence
  Synthetic
acgacccgctggacctcact

SEQ ID NO: 714 - DNA, 20 bp, Artificial Sequence
  Synthetic
acctgcgggtgcgtggctgc

SEQ ID NO: 715 - DNA, 20 bp, Artificial Sequence
  Synthetic
aattccggagtatcggccat

SEQ ID NO: 716 - DNA, 20 bp, Artificial Sequence
  Synthetic
ttctccggcttagaggtgac

SEQ ID NO: 717 - DNA, 20 bp, Artificial Sequence
  Synthetic
gggtcggaatgacccagata

SEQ ID NO: 718 - DNA, 20 bp, Artificial Sequence
  Synthetic
caagggctgtggccggcaac

SEQ ID NO: 719 - DNA, 20 bp, Artificial Sequence
  Synthetic
tgtacacagttgcaacacct

SEQ ID NO: 720 - DNA, 20 bp, Artificial Sequence
  Synthetic
ggtcccggatgtggtgagga

SEQ ID NO: 721 - DNA, 20 bp, Artificial Sequence
  Synthetic
ggtgggttacggtcttcaaa

SEQ ID NO: 722 - DNA, 20 bp, Artificial Sequence
  Synthetic
atactgccgggaagaagcaa

SEQ ID NO: 723 - DNA, 20 bp, Artificial Sequence
  Synthetic
gcagcagagcttgcggcgcc

SEQ ID NO: 724 - DNA, 20 bp, Artificial Sequence
  Synthetic
ctcctggagggtgctgttca

SEQ ID NO: 725 - DNA, 20 bp, Artificial Sequence
  Synthetic
ctgtacacagttgcaacacc

SEQ ID NO: 726 - DNA, 20 bp, Artificial Sequence
  Synthetic
aggtgagcaatctgtcagca

SEQ ID NO: 727 - DNA, 20 bp, Artificial Sequence
  Synthetic
ctgtcctctccagctccagg

SEQ ID NO: 728 - DNA, 20 bp, Artificial Sequence
  Synthetic
tccatgggggccatgaggtg

SEQ ID NO: 729 - DNA, 20 bp, Artificial Sequence
  Synthetic
catagcggatcagggagaag

SEQ ID NO: 730 - DNA, 20 bp, Artificial Sequence
  Synthetic
gtacagaggtattgttcttt

SEQ ID NO: 731 - DNA, 20 bp, Artificial Sequence
  Synthetic
aatacgggaaaaaggcgtgg

SEQ ID NO: 732 - DNA, 20 bp, Artificial Sequence
  Synthetic
gaagcatgtgtggagcgcct

SEQ ID NO: 733 - DNA, 20 bp, Artificial Sequence
  Synthetic
aagaacccgggcacgctctt

SEQ ID NO: 734 - DNA, 20 bp, Artificial Sequence
  Synthetic
gaggctggtgtcaatccttc

SEQ ID NO: 735 - DNA, 20 bp, Artificial Sequence
  Synthetic
ccagcggtacagggtgacca

SEQ ID NO: 736 - DNA, 20 bp, Artificial Sequence
  Synthetic
ttggcacgaatgaaaaggtt

SEQ ID NO: 737 - DNA, 20 bp, Artificial Sequence
  Synthetic
cagcccgggcggcggcggcg

SEQ ID NO: 738 - DNA, 20 bp, Artificial Sequence
  Synthetic
acagcgaaatctcgatggag

SEQ ID NO: 739 - DNA, 20 bp, Artificial Sequence
  Synthetic
ggtggcactggaaggggaag

SEQ ID NO: 740 - DNA, 20 bp, Artificial Sequence
  Synthetic
ccgggagatgaaatgggatt

SEQ ID NO: 741 - DNA, 20 bp, Artificial Sequence
  Synthetic
gtctgatgcactgtgtgcag

SEQ ID NO: 742 - DNA, 20 bp, Artificial Sequence
  Synthetic
gacgttgtagtccacgatgc

SEQ ID NO: 743 - DNA, 20 bp, Artificial Sequence
  Synthetic
ttgcaccattggccgcacac

SEQ ID NO: 744 - DNA, 20 bp, Artificial Sequence
  Synthetic
gccctgccgtacccgctgcc

SEQ ID NO: 745 - DNA, 20 bp, Artificial Sequence
  Synthetic
gcggttcaagggcaaatggg

SEQ ID NO: 746 - DNA, 20 bp, Artificial Sequence
  Synthetic
tttacgcaatggaacgcccg

SEQ ID NO: 747 - DNA, 20 bp, Artificial Sequence
  Synthetic
tgcacaacagcacccgcgac

SEQ ID NO: 748 - DNA, 20 bp, Artificial Sequence
  Synthetic
ggaccggctgtcacgggctc

SEQ ID NO: 749 - DNA, 20 bp, Artificial Sequence
  Synthetic
gcactgtgtactcctgtgag

SEQ ID NO: 750 - DNA, 20 bp, Artificial Sequence
  Synthetic
gaagcagattttctgccagg

SEQ ID NO: 751 - DNA, 20 bp, Artificial Sequence
  Synthetic
ggtgacggtgagctctgcaa

SEQ ID NO: 752 - DNA, 20 bp, Artificial Sequence
  Synthetic
tgtgagatccgccctttcca

SEQ ID NO: 753 - DNA, 20 bp, Artificial Sequence
  Synthetic
ccacagcaaaccagtaaatc

SEQ ID NO: 754 - DNA, 20 bp, Artificial Sequence
  Synthetic
tactgagagcacagcgcagc

SEQ ID NO: 755 - DNA, 20 bp, Artificial Sequence
  Synthetic
aagctccgaggtcctggggg

SEQ ID NO: 756 - DNA, 20 bp, Artificial Sequence
  Synthetic
cgtgtgctggcccatcactt

SEQ ID NO: 757 - DNA, 20 bp, Artificial Sequence
  Synthetic
taccgccgtgaatgcccgcc

SEQ ID NO: 758 - DNA, 20 bp, Artificial Sequence
  Synthetic
aacctccactgggccgacac

SEQ ID NO: 759 - DNA, 20 bp, Artificial Sequence
  Synthetic
ttaccgtgcgaagttaacgt

SEQ ID NO: 760 - DNA, 20 bp, Artificial Sequence
  Synthetic
tgtactttctccagctccac

SEQ ID NO: 761 - DNA, 20 bp, Artificial Sequence
  Synthetic
cattcgcggtggacgatgga

SEQ ID NO: 762 - DNA, 20 bp, Artificial Sequence
  Synthetic
ggaacaccgtccattggcat

SEQ ID NO: 763 - DNA, 20 bp, Artificial Sequence
  Synthetic
cggatgctgcaggtgcacac

SEQ ID NO: 764 - DNA, 20 bp, Artificial Sequence
  Synthetic
ccgcactccgacctgagcca

SEQ ID NO: 765 - DNA, 20 bp, Artificial Sequence
  Synthetic
gcagaccgcaagaataccat

SEQ ID NO: 766 - DNA, 20 bp, Artificial Sequence
  Synthetic
tcatctggaacagtctacaa

SEQ ID NO: 767 - DNA, 20 bp, Artificial Sequence
  Synthetic
ctgtctcttcctctagagtc

SEQ ID NO: 768 - DNA, 20 bp, Artificial Sequence
  Synthetic
gggccgatccagcaggtaag

SEQ ID NO: 769 - DNA, 20 bp, Artificial Sequence
  Synthetic
gcggctggccttgggattga

SEQ ID NO: 770 - DNA, 20 bp, Artificial Sequence
  Synthetic
ccgttacccggagggccaac

SEQ ID NO: 771 - DNA, 20 bp, Artificial Sequence
  Synthetic
gcaccgcagcctggccagcc

SEQ ID NO: 772 - DNA, 20 bp, Artificial Sequence
  Synthetic
ttggccccgttgagtctatc

SEQ ID NO: 773 - DNA, 20 bp, Artificial Sequence
  Synthetic
cgccggccaccagcactgcc

SEQ ID NO: 774 - DNA, 20 bp, Artificial Sequence
  Synthetic
actttaagtccctgtttgtg

SEQ ID NO: 775 - DNA, 20 bp, Artificial Sequence
  Synthetic
tccggaggtaggacccggcg

SEQ ID NO: 776 - DNA, 20 bp, Artificial Sequence
  Synthetic
ttctgacaggcagcctgcac

SEQ ID NO: 777 - DNA, 20 bp, Artificial Sequence
  Synthetic
tgctctcgattcgacttaaa

SEQ ID NO: 778 - DNA, 20 bp, Artificial Sequence
  Synthetic
gttcacgacaacgtgcacag

SEQ ID NO: 779 - DNA, 20 bp, Artificial Sequence
  Synthetic
tctcggcaactgagcgaatt

SEQ ID NO: 780 - DNA, 20 bp, Artificial Sequence
  Synthetic
ccgaaggcttcaatttccac

SEQ ID NO: 781 - DNA, 20 bp, Artificial Sequence
  Synthetic
ttgaacctgcaaccggttct

SEQ ID NO: 782 - DNA, 20 bp, Artificial Sequence
  Synthetic
gctgatcttcagcctccttt

SEQ ID NO: 783 - DNA, 20 bp, Artificial Sequence
  Synthetic
gcacccgcgtctcctggtcg

SEQ ID NO: 784 - DNA, 20 bp, Artificial Sequence
  Synthetic
ggccaacgcattaatacagt

SEQ ID NO: 785 - DNA, 20 bp, Artificial Sequence
  Synthetic
tgttctggtcctgctttgag

SEQ ID NO: 786 - DNA, 20 bp, Artificial Sequence
  Synthetic
tcattgcaagggaagtcctt

SEQ ID NO: 787 - DNA, 20 bp, Artificial Sequence
  Synthetic
tgcaaaccgggccttctcac

SEQ ID NO: 788 - DNA, 20 bp, Artificial Sequence
  Synthetic
ccgggtcgggccagtgccca

SEQ ID NO: 789 - DNA, 20 bp, Artificial Sequence
  Synthetic
caccacggagaagcataaag

SEQ ID NO: 790 - DNA, 20 bp, Artificial Sequence
  Synthetic
ccgcgcgccgcttgcgctcc

SEQ ID NO: 791 - DNA, 20 bp, Artificial Sequence
  Synthetic
agccgctaccggtgtaatga

SEQ ID NO: 792 - DNA, 20 bp, Artificial Sequence
  Synthetic
tacgatggggcgctcagggt

SEQ ID NO: 793 - DNA, 20 bp, Artificial Sequence
  Synthetic
tgcagaccgcaagaatacca

SEQ ID NO: 794 - DNA, 20 bp, Artificial Sequence
  Synthetic
ctacctcccggaggccgcag

SEQ ID NO: 795 - DNA, 20 bp, Artificial Sequence
  Synthetic
ggcccgcccggacggaaggc

SEQ ID NO: 796 - DNA, 20 bp, Artificial Sequence
  Synthetic
agcgacaggcctggaaaacc

SEQ ID NO: 797 - DNA, 20 bp, Artificial Sequence
  Synthetic
tacatttacaggtcccacga

SEQ ID NO: 798 - DNA, 20 bp, Artificial Sequence
  Synthetic
acaaagctccgaggtcctgg

SEQ ID NO: 799 - DNA, 20 bp, Artificial Sequence
  Synthetic
aaaatacctcacgggagagg

SEQ ID NO: 800 - DNA, 20 bp, Artificial Sequence
  Synthetic
gggctggcagcgccaggtga

SEQ ID NO: 801 - DNA, 20 bp, Artificial Sequence
  Synthetic
aagatcactggcaattcagt

SEQ ID NO: 802 - DNA, 20 bp, Artificial Sequence
  Synthetic
cttcacccgggtcatggcgc

SEQ ID NO: 803 - DNA, 20 bp, Artificial Sequence
  Synthetic
tcttttcatatttaggggta

SEQ ID NO: 804 - DNA, 20 bp, Artificial Sequence
  Synthetic
ttccccgatgaggcagatgc

SEQ ID NO: 805 - DNA, 20 bp, Artificial Sequence
  Synthetic
cgccgagcggaaacttttgt

SEQ ID NO: 806 - DNA, 20 bp, Artificial Sequence
  Synthetic
attgcacgtccctgttcact

SEQ ID NO: 807 - DNA, 20 bp, Artificial Sequence
  Synthetic
gtactttctccagctccact

SEQ ID NO: 808 - DNA, 20 bp, Artificial Sequence
  Synthetic
acagcgcaccggcatcgagg

SEQ ID NO: 809 - DNA, 20 bp, Artificial Sequence
  Synthetic
catgactcgggctgcaacca

SEQ ID NO: 810 - DNA, 20 bp, Artificial Sequence
  Synthetic
agtccacctggggaggaagg

SEQ ID NO: 811 - DNA, 20 bp, Artificial Sequence
  Synthetic
tgaatggcagccagggttgc

SEQ ID NO: 812 - DNA, 20 bp, Artificial Sequence
  Synthetic
ggcctgcagtaggtacgcgg

SEQ ID NO: 813 - DNA, 20 bp, Artificial Sequence
  Synthetic
ggcagaccaccagcagccta

SEQ ID NO: 814 - DNA, 20 bp, Artificial Sequence
  Synthetic
agacagcgcaccggcatcga

SEQ ID NO: 815 - DNA, 20 bp, Artificial Sequence
  Synthetic
tctgtccaggatgctcccaa

SEQ ID NO: 816 - DNA, 20 bp, Artificial Sequence
  Synthetic
catgcgccgcctcgaggcct

SEQ ID NO: 817 - DNA, 20 bp, Artificial Sequence
  Synthetic
ccaggcttcccaaggttacc

SEQ ID NO: 818 - DNA, 20 bp, Artificial Sequence
  Synthetic
gcgccgcctcgaggccttgg

SEQ ID NO: 819 - DNA, 20 bp, Artificial Sequence
  Synthetic
caccttcccgtcggtgtatg

SEQ ID NO: 820 - DNA, 20 bp, Artificial Sequence
  Synthetic
tggtgcggtcccgcgggcag

SEQ ID NO: 821 - DNA, 20 bp, Artificial Sequence
  Synthetic
cctgcgcgggtggtatcagt

SEQ ID NO: 822 - DNA, 20 bp, Artificial Sequence
  Synthetic
gcacacgtcccaacagctca

SEQ ID NO: 823 - DNA, 20 bp, Artificial Sequence
  Synthetic
gtcgaacgcccgggtggagg

SEQ ID NO: 824 - DNA, 20 bp, Artificial Sequence
  Synthetic
ccctgccctccatcacccac

SEQ ID NO: 825 - DNA, 20 bp, Artificial Sequence
  Synthetic
gcagcccggagcatgggctg

SEQ ID NO: 826 - DNA, 20 bp, Artificial Sequence
  Synthetic
gtcgccgcccgtggcccctg

SEQ ID NO: 827 - DNA, 20 bp, Artificial Sequence
  Synthetic
ccactgacagcagcgatgac

SEQ ID NO: 828 - DNA, 20 bp, Artificial Sequence
  Synthetic
tgcactcgccgtgggtgcag

SEQ ID NO: 829 - DNA, 20 bp, Artificial Sequence
  Synthetic
cagtggccgtacagggagat

SEQ ID NO: 830 - DNA, 20 bp, Artificial Sequence
  Synthetic
gcgaatatcttctgcaatgg

SEQ ID NO: 831 - DNA, 20 bp, Artificial Sequence
  Synthetic
cgtcgcccaggagctgtggg

SEQ ID NO: 832 - DNA, 20 bp, Artificial Sequence
  Synthetic
gaacaccgtccattggcatg

SEQ ID NO: 833 - DNA, 20 bp, Artificial Sequence
  Synthetic
tcacgttgcagccgaggttc

SEQ ID NO: 834 - DNA, 20 bp, Artificial Sequence
  Synthetic
gcacgtcgcccaggagctgt

SEQ ID NO: 835 - DNA, 20 bp, Artificial Sequence
  Synthetic
tcagtctggcaaagaagaag

SEQ ID NO: 836 - DNA, 20 bp, Artificial Sequence
  Synthetic
atccacccgggccaccagcc

SEQ ID NO: 837 - DNA, 20 bp, Artificial Sequence
  Synthetic
gacagcgcaccggcatcgag

SEQ ID NO: 838 - DNA, 20 bp, Artificial Sequence
  Synthetic
agacttcgctttccttggtc

SEQ ID NO: 839 - DNA, 20 bp, Artificial Sequence
  Synthetic
cacccgcaagtccctgccca

SEQ ID NO: 840 - DNA, 20 bp, Artificial Sequence
  Synthetic
cactactggggtctcggtca

SEQ ID NO: 841 - DNA, 20 bp, Artificial Sequence
  Synthetic
cattcggaagaatgaacaga

SEQ ID NO: 842 - DNA, 20 bp, Artificial Sequence
  Synthetic
ctctgccttggatcctaacc

SEQ ID NO: 843 - DNA, 20 bp, Artificial Sequence
  Synthetic
atcatctggaacagtctaca

SEQ ID NO: 844 - DNA, 20 bp, Artificial Sequence
  Synthetic
ttcacgacaacgtgcacaga

SEQ ID NO: 845 - DNA, 20 bp, Artificial Sequence
  Synthetic
gggctgctgcgcagcggccg

SEQ ID NO: 846 - DNA, 20 bp, Artificial Sequence
  Synthetic
ggacaacgtagaaatactcc

SEQ ID NO: 847 - DNA, 20 bp, Artificial Sequence
  Synthetic
gaaatccaaagtacctgtag

SEQ ID NO: 848 - DNA, 20 bp, Artificial Sequence
  Synthetic
tttaccgtgcgaagttaacg

SEQ ID NO: 849 - DNA, 20 bp, Artificial Sequence
  Synthetic
agccccctgtgtgctcaagg

SEQ ID NO: 850 - DNA, 20 bp, Artificial Sequence
  Synthetic
agacagcttctcctgagaat

SEQ ID NO: 851 - DNA, 20 bp, Artificial Sequence
  Synthetic
ccagacgtcgcccaggccga

SEQ ID NO: 852 - DNA, 20 bp, Artificial Sequence
  Synthetic
aggaacaccgtccattggca

SEQ ID NO: 853 - DNA, 20 bp, Artificial Sequence
  Synthetic
ggtgccatagaaaaggagga

SEQ ID NO: 854 - DNA, 20 bp, Artificial Sequence
  Synthetic
ctcgccgtgggtgcagaggc

SEQ ID NO: 855 - DNA, 20 bp, Artificial Sequence
  Synthetic
aattcaccgtaaagctggaa

SEQ ID NO: 856 - DNA, 20 bp, Artificial Sequence
  Synthetic
atgtatcaattacagacact

SEQ ID NO: 857 - DNA, 20 bp, Artificial Sequence
  Synthetic
tgcacacatatgtgccaatg

SEQ ID NO: 858 - DNA, 20 bp, Artificial Sequence
  Synthetic
ctgtgagatccgccctttcc

SEQ ID NO: 859 - DNA, 20 bp, Artificial Sequence
  Synthetic
cacggggccttctacagtga

SEQ ID NO: 860 - DNA, 20 bp, Artificial Sequence
  Synthetic
agcacatcgcccaagagctg

SEQ ID NO: 861 - DNA, 20 bp, Artificial Sequence
  Synthetic
ccggatgaagtagcacacga

SEQ ID NO: 862 - DNA, 20 bp, Artificial Sequence
  Synthetic
atacggaggtaatggcatgt

SEQ ID NO: 863 - DNA, 20 bp, Artificial Sequence
  Synthetic
ctttacccagagcttcgtcc

SEQ ID NO: 864 - DNA, 20 bp, Artificial Sequence
  Synthetic
cagaagttgctcaaatcctg

SEQ ID NO: 865 - DNA, 20 bp, Artificial Sequence
  Synthetic
cgacgcagatggtgatgccc

SEQ ID NO: 866 - DNA, 20 bp, Artificial Sequence
  Synthetic
gaggagcccaatatgatcca

SEQ ID NO: 867 - DNA, 20 bp, Artificial Sequence
  Synthetic
cagtgaaagcacgggccagc

SEQ ID NO: 868 - DNA, 20 bp, Artificial Sequence
  Synthetic
cgagcggctgccgagccggg

SEQ ID NO: 869 - DNA, 20 bp, Artificial Sequence
  Synthetic
tgcacttgcagcgccggttc

SEQ ID NO: 870 - DNA, 20 bp, Artificial Sequence
  Synthetic
atgttgtcaggggcaatgtg

SEQ ID NO: 871 - DNA, 20 bp, Artificial Sequence
  Synthetic
gtgcatgctgcacaactttg

SEQ ID NO: 872 - DNA, 20 bp, Artificial Sequence
  Synthetic
tactcttgcagtctgcatgc

SEQ ID NO: 873 - DNA, 20 bp, Artificial Sequence
  Synthetic
tccattcctgaatggaacag

SEQ ID NO: 874 - DNA, 20 bp, Artificial Sequence
  Synthetic
cctgcaccggtacacgggcg

SEQ ID NO: 875 - DNA, 20 bp, Artificial Sequence
  Synthetic
ttccgataggcagcctgcac

SEQ ID NO: 876 - DNA, 20 bp, Artificial Sequence
  Synthetic
ggatcggcttcactgtgctg

SEQ ID NO: 877 - DNA, 20 bp, Artificial Sequence
  Synthetic
ttccggagatttatgttcta

SEQ ID NO: 878 - DNA, 20 bp, Artificial Sequence
  Synthetic
cgtataggccacattgagat

SEQ ID NO: 879 - DNA, 20 bp, Artificial Sequence
  Synthetic
taggcacacagctgacaaag

SEQ ID NO: 880 - DNA, 20 bp, Artificial Sequence
  Synthetic
actggttaggcggatctggt

SEQ ID NO: 881 - DNA, 20 bp, Artificial Sequence
  Synthetic
tgctgatgttgctggaccag

SEQ ID NO: 882 - DNA, 20 bp, Artificial Sequence
  Synthetic
ggtgcgccgcttggacatac

SEQ ID NO: 883 - DNA, 20 bp, Artificial Sequence
  Synthetic
tggagccggtagctaaagaa

SEQ ID NO: 884 - DNA, 20 bp, Artificial Sequence
  Synthetic
ggaggctcacgatgagtgcc

SEQ ID NO: 885 - DNA, 20 bp, Artificial Sequence
  Synthetic
acagaaggaatagggacgag

SEQ ID NO: 886 - DNA, 20 bp, Artificial Sequence
  Synthetic
acgacaggagaggtcataac

SEQ ID NO: 887 - DNA, 20 bp, Artificial Sequence
  Synthetic
catgaacgcctccatggtgt

SEQ ID NO: 888 - DNA, 20 bp, Artificial Sequence
  Synthetic
tttctcgatacggggagctg

SEQ ID NO: 889 - DNA, 20 bp, Artificial Sequence
  Synthetic
atcgatcgcaccctaaaagc

SEQ ID NO: 890 - DNA, 20 bp, Artificial Sequence
  Synthetic
agcagccacgatagcccaga

SEQ ID NO: 891 - DNA, 20 bp, Artificial Sequence
  Synthetic
tgctgacgaaggtagcaggg

SEQ ID NO: 892 - DNA, 20 bp, Artificial Sequence
  Synthetic
actggaatccagaaaccagt

SEQ ID NO: 893 - DNA, 20 bp, Artificial Sequence
  Synthetic
cacgaaaaagccaagatgcg

SEQ ID NO: 894 - DNA, 20 bp, Artificial Sequence
  Synthetic
cgaggttgtccaggtgagcc

SEQ ID NO: 895 - DNA, 20 bp, Artificial Sequence
  Synthetic
cggctggagagcatccacct

SEQ ID NO: 896 - DNA, 20 bp, Artificial Sequence
  Synthetic
gtccccgcagggcattggca

SEQ ID NO: 897 - DNA, 20 bp, Artificial Sequence
  Synthetic
attcaccgtaaagctggaaa

SEQ ID NO: 898 - DNA, 20 bp, Artificial Sequence
  Synthetic
ccccgctctccatcacccac

SEQ ID NO: 899 - DNA, 20 bp, Artificial Sequence
  Synthetic
ccacactggttaggcggatc

SEQ ID NO: 900 - DNA, 20 bp, Artificial Sequence
  Synthetic
cctgtgcgtcccccaggggc

SEQ ID NO: 901 - DNA, 20 bp, Artificial Sequence
  Synthetic
tccacccgggccaccagcca

SEQ ID NO: 902 - DNA, 20 bp, Artificial Sequence
  Synthetic
cagccgcccctgctgggagt

SEQ ID NO: 903 - DNA, 20 bp, Artificial Sequence
  Synthetic
tgggtgcccaataagaccga

SEQ ID NO: 904 - DNA, 20 bp, Artificial Sequence
  Synthetic
gccgctggatcccgaaggtg

SEQ ID NO: 905 - DNA, 20 bp, Artificial Sequence
  Synthetic
gatgcgatgaaggagatggg

SEQ ID NO: 906 - DNA, 20 bp, Artificial Sequence
  Synthetic
acacccgcaagtccctgccc

SEQ ID NO: 907 - DNA, 20 bp, Artificial Sequence
  Synthetic
ggccgatccagcaggtaagt

SEQ ID NO: 908 - DNA, 20 bp, Artificial Sequence
  Synthetic
tgccactgtcactgtagtct

SEQ ID NO: 909 - DNA, 20 bp, Artificial Sequence
  Synthetic
cgccacctgcgcgacttctg

SEQ ID NO: 910 - DNA, 20 bp, Artificial Sequence
  Synthetic
aagctcccggacttttttct

SEQ ID NO: 911 - DNA, 20 bp, Artificial Sequence
  Synthetic
acggcgagtcgcattcgtgc

SEQ ID NO: 912 - DNA, 20 bp, Artificial Sequence
  Synthetic
ccttcgccacgcgcctggac

SEQ ID NO: 913 - DNA, 20 bp, Artificial Sequence
  Synthetic
acggaagagaaactcatgat

SEQ ID NO: 914 - DNA, 20 bp, Artificial Sequence
  Synthetic
tgtgcacgatgttggaggct

SEQ ID NO: 915 - DNA, 20 bp, Artificial Sequence
  Synthetic
gtccgagctacagcaagatc

SEQ ID NO: 916 - DNA, 20 bp, Artificial Sequence
  Synthetic
aaccggctattgttacccag

SEQ ID NO: 917 - DNA, 20 bp, Artificial Sequence
  Synthetic
gcaggagcccaacgtgacgg

SEQ ID NO: 918 - DNA, 20 bp, Artificial Sequence
  Synthetic
gtgcactgagggccttgggg

SEQ ID NO: 919 - DNA, 20 bp, Artificial Sequence
  Synthetic
tccccgtgctgctggagttg

SEQ ID NO: 920 - DNA, 20 bp, Artificial Sequence
  Synthetic
caccatcccgagtgcagacc

SEQ ID NO: 921 - DNA, 20 bp, Artificial Sequence
  Synthetic
gcacggcaccgtcaccaact

SEQ ID NO: 922 - DNA, 20 bp, Artificial Sequence
  Synthetic
gaccgcgtccagtttcagag

SEQ ID NO: 923 - DNA, 20 bp, Artificial Sequence
  Synthetic
ccgcactgccatcattgccc

SEQ ID NO: 924 - DNA, 20 bp, Artificial Sequence
  Synthetic
ccaacaatgcagagtgaggt

SEQ ID NO: 925 - DNA, 20 bp, Artificial Sequence
  Synthetic
ggctgatcacctcacgctcc

SEQ ID NO: 926 - DNA, 20 bp, Artificial Sequence
  Synthetic
cagccttgcccagttttccc

SEQ ID NO: 927 - DNA, 20 bp, Artificial Sequence
  Synthetic
cgatctgagtcatcttctcc

SEQ ID NO: 928 - DNA, 20 bp, Artificial Sequence
  Synthetic
agacagaggcagaaatcgtg

SEQ ID NO: 929 - DNA, 20 bp, Artificial Sequence
  Synthetic
cgtgcgagttggcagcggcg

SEQ ID NO: 930 - DNA, 20 bp, Artificial Sequence
  Synthetic
cgttcggcttgtggtgtaat

SEQ ID NO: 931 - DNA, 20 bp, Artificial Sequence
  Synthetic
ggtgctcccaggtggggccc

SEQ ID NO: 932 - DNA, 20 bp, Artificial Sequence
  Synthetic
ttcggtaacctacagctcac

SEQ ID NO: 933 - DNA, 20 bp, Artificial Sequence
  Synthetic
accgaaggctggtggccaca

SEQ ID NO: 934 - DNA, 20 bp, Artificial Sequence
  Synthetic
ccgaagtcgaaaccagcgct

SEQ ID NO: 935 - DNA, 20 bp, Artificial Sequence
  Synthetic
agcacatctcacggccgcgc

SEQ ID NO: 936 - DNA, 20 bp, Artificial Sequence
  Synthetic
ttcctactcggacaaagttc

SEQ ID NO: 937 - DNA, 20 bp, Artificial Sequence
  Synthetic
cagcacaacactgctgctgt

SEQ ID NO: 938 - DNA, 20 bp, Artificial Sequence
  Synthetic
gacgctggccagctacgggc

SEQ ID NO: 939 - DNA, 20 bp, Artificial Sequence
  Synthetic
catgctgcagaagactttga

SEQ ID NO: 940 - DNA, 20 bp, Artificial Sequence
  Synthetic
cgaaacgtgtatctcctccc

SEQ ID NO: 941 - DNA, 20 bp, Artificial Sequence
  Synthetic
ttagtgacacttgtgggcca

SEQ ID NO: 942 - DNA, 20 bp, Artificial Sequence
  Synthetic
ttcctcgcccgtcaggagga

SEQ ID NO: 943 - DNA, 20 bp, Artificial Sequence
  Synthetic
tcccgctggccctcgcggcc

SEQ ID NO: 944 - DNA, 20 bp, Artificial Sequence
  Synthetic
gccgaggaggctctcttctg

SEQ ID NO: 945 - DNA, 20 bp, Artificial Sequence
  Synthetic
ctcccggcgctacggaagtg

SEQ ID NO: 946 - DNA, 20 bp, Artificial Sequence
  Synthetic
ctgccgccaaaactgaaggc

SEQ ID NO: 947 - DNA, 20 bp, Artificial Sequence
  Synthetic
gccaacgcattaatacagtg

SEQ ID NO: 948 - DNA, 20 bp, Artificial Sequence
  Synthetic
aaggccagaatagaaggaat

SEQ ID NO: 949 - DNA, 20 bp, Artificial Sequence
  Synthetic
ctgtccaggatgctcccaag

SEQ ID NO: 950 - DNA, 20 bp, Artificial Sequence
  Synthetic
ctgccgcgcgtggcccgagg

SEQ ID NO: 951 - DNA, 20 bp, Artificial Sequence
  Synthetic
gtacacggcgggcacgttga

SEQ ID NO: 952 - DNA, 20 bp, Artificial Sequence
  Synthetic
acccaaacgaatatcttgtg

SEQ ID NO: 953 - DNA, 20 bp, Artificial Sequence
  Synthetic
cctcgtaggtgctggtgtcc

SEQ ID NO: 954 - DNA, 20 bp, Artificial Sequence
  Synthetic
gctgccgcgcgtggcccgag

SEQ ID NO: 955 - DNA, 20 bp, Artificial Sequence
  Synthetic
agtacacatctcctaacttc

SEQ ID NO: 956 - DNA, 20 bp, Artificial Sequence
  Synthetic
agtccacacgcatatgtgta

SEQ ID NO: 957 - DNA, 20 bp, Artificial Sequence
  Synthetic
tgctgacggctctggtcagc

SEQ ID NO: 958 - DNA, 20 bp, Artificial Sequence
  Synthetic
tgacatgggcattctgggaa

SEQ ID NO: 959 - DNA, 20 bp, Artificial Sequence
  Synthetic
gtttagttcgatttataaga

SEQ ID NO: 960 - DNA, 20 bp, Artificial Sequence
  Synthetic
gagaaggccgtgtaggtaag

SEQ ID NO: 961 - DNA, 20 bp, Artificial Sequence
  Synthetic
gaacccaccgggtgacgatg

SEQ ID NO: 962 - DNA, 20 bp, Artificial Sequence
  Synthetic
gccgtcgtcgacgacgagcg

SEQ ID NO: 963 - DNA, 20 bp, Artificial Sequence
  Synthetic
accgtggaactggcccaact

SEQ ID NO: 964 - DNA, 20 bp, Artificial Sequence
  Synthetic
ctttaagtccctgtttgtgc

SEQ ID NO: 965 - DNA, 20 bp, Artificial Sequence
  Synthetic
gcgtatggtctctttgtttc

SEQ ID NO: 966 - DNA, 20 bp, Artificial Sequence
  Synthetic
gagtcctttgcccttttgag

SEQ ID NO: 967 - DNA, 20 bp, Artificial Sequence
  Synthetic
gtactgcctgtctggggaca

SEQ ID NO: 968 - DNA, 20 bp, Artificial Sequence
  Synthetic
gtggagccggtagctaaaga

SEQ ID NO: 969 - DNA, 20 bp, Artificial Sequence
  Synthetic
cgcctgcacctcttcatgcc

SEQ ID NO: 970 - DNA, 20 bp, Artificial Sequence
  Synthetic
tgagccttccgtgttttcac

SEQ ID NO: 971 - DNA, 20 bp, Artificial Sequence
  Synthetic
ctcattgttcccgcctttcc

SEQ ID NO: 972 - DNA, 20 bp, Artificial Sequence
  Synthetic
ctgccgtgggtgcagaggct

SEQ ID NO: 973 - DNA, 20 bp, Artificial Sequence
  Synthetic
gttggcctcgggattgaggg

SEQ ID NO: 974 - DNA, 20 bp, Artificial Sequence
  Synthetic
cccagcacagttggcaaaca

SEQ ID NO: 975 - DNA, 20 bp, Artificial Sequence
  Synthetic
ccatcgactgtgtgcatttt

SEQ ID NO: 976 - DNA, 20 bp, Artificial Sequence
  Synthetic
gcgtggctgctcggtctcca

SEQ ID NO: 977 - DNA, 20 bp, Artificial Sequence
  Synthetic
tagcacatttgcaacaagct

SEQ ID NO: 978 - DNA, 20 bp, Artificial Sequence
  Synthetic
ttggcggctgctggatccac

SEQ ID NO: 979 - DNA, 20 bp, Artificial Sequence
  Synthetic
gcagatgactcgggcaaagg

SEQ ID NO: 980 - DNA, 20 bp, Artificial Sequence
  Synthetic
ccgggcctcgtcgcccacat

SEQ ID NO: 981 - DNA, 20 bp, Artificial Sequence
  Synthetic
gatgctgcccgtgttgagct

SEQ ID NO: 982 - DNA, 20 bp, Artificial Sequence
  Synthetic
cccatacgcctgccttccaa

SEQ ID NO: 983 - DNA, 20 bp, Artificial Sequence
  Synthetic
cggcgtggaagagagcatca

SEQ ID NO: 984 - DNA, 20 bp, Artificial Sequence
  Synthetic
cacgcaaaggaagggctact

SEQ ID NO: 985 - DNA, 20 bp, Artificial Sequence
  Synthetic
gccggagcttgagagagacg

SEQ ID NO: 986 - DNA, 20 bp, Artificial Sequence
  Synthetic
ccgtgtggtctcgcgatcag

SEQ ID NO: 987 - DNA, 20 bp, Artificial Sequence
  Synthetic
tgccgcggtggcgctgtcag

SEQ ID NO: 988 - DNA, 20 bp, Artificial Sequence
  Synthetic
cgttgttttgggacaccact

SEQ ID NO: 989 - DNA, 20 bp, Artificial Sequence
  Synthetic
attcgcggtggacgatggaa

SEQ ID NO: 990 - DNA, 20 bp, Artificial Sequence
  Synthetic
ccggagatggcaatcgaagc

SEQ ID NO: 991 - DNA, 20 bp, Artificial Sequence
  Synthetic
cgaatccgcactcatcatcc

SEQ ID NO: 992 - DNA, 20 bp, Artificial Sequence
  Synthetic
aaactgccgtttagattacc

SEQ ID NO: 993 - DNA, 20 bp, Artificial Sequence
  Synthetic
gcgacgcgctcgtactcaga

SEQ ID NO: 994 - DNA, 20 bp, Artificial Sequence
  Synthetic
ggtgtcgaacgcccgggtgg

SEQ ID NO: 995 - DNA, 20 bp, Artificial Sequence
  Synthetic
gacgctggccacggccacga

SEQ ID NO: 996 - DNA, 20 bp, Artificial Sequence
  Synthetic
gcgctctcggcaaagaacgc

SEQ ID NO: 997 - DNA, 20 bp, Artificial Sequence
  Synthetic
gtgcggcatttgtcctgctc

SEQ ID NO: 998 - DNA, 20 bp, Artificial Sequence
  Synthetic
gccctcgttgctctctgagt

SEQ ID NO: 999 - DNA, 20 bp, Artificial Sequence
  Synthetic
gcagccgcccctgctgggag

SEQ ID NO: 1000 - DNA, 20 bp, Artificial Sequence
  Synthetic
ggccgcgcatgtgttcagaa

SEQ ID NO: 1001 - DNA, 20 bp, Artificial Sequence
  Synthetic
aggtccaaggcccaggctgg

SEQ ID NO: 1002 - DNA, 20 bp, Artificial Sequence
  Synthetic
ttatccgctgctcaagggac

SEQ ID NO: 1003 - DNA, 20 bp, Artificial Sequence
  Synthetic
atgtgttcgcgcagggagct

SEQ ID NO: 1004 - DNA, 20 bp, Artificial Sequence
  Synthetic
agcataccggcggatggtcc

SEQ ID NO: 1005 - DNA, 20 bp, Artificial Sequence
  Synthetic
tgtgttcgcgcagggagctc

SEQ ID NO: 1006 - DNA, 20 bp, Artificial Sequence
  Synthetic
cgcctccatggtgtgggcgc

SEQ ID NO: 1007 - DNA, 20 bp, Artificial Sequence
  Synthetic
gcacaccttgaggtcacggc

SEQ ID NO: 1008 - DNA, 20 bp, Artificial Sequence
  Synthetic
ccgaatgtcctggatttcca

SEQ ID NO: 1009 - DNA, 20 bp, Artificial Sequence
  Synthetic
actctttgggatcgacttcc

SEQ ID NO: 1010 - DNA, 20 bp, Artificial Sequence
  Synthetic
ggaagcggcgtgctgtgctg

SEQ ID NO: 1011 - DNA, 20 bp, Artificial Sequence
  Synthetic
cgtgccgctagacacggacg

SEQ ID NO: 1012 - DNA, 20 bp, Artificial Sequence
  Synthetic
aatgcgactgctgacaaaga

SEQ ID NO: 1013 - DNA, 20 bp, Artificial Sequence
  Synthetic
cctgcgggtgcgtggctgca

SEQ ID NO: 1014 - DNA, 20 bp, Artificial Sequence
  Synthetic
tctacccggaccctgcatac

SEQ ID NO: 1015 - DNA, 20 bp, Artificial Sequence
  Synthetic
agagattctggggcaggcgt

SEQ ID NO: 1016 - DNA, 20 bp, Artificial Sequence
  Synthetic
gaaaaccaattgatgaggta

SEQ ID NO: 1017 - DNA, 20 bp, Artificial Sequence
  Synthetic
tgcctcatcaagctacccaa

SEQ ID NO: 1018 - DNA, 20 bp, Artificial Sequence
  Synthetic
gtacctcacaaaaacagtag

SEQ ID NO: 1019 - DNA, 20 bp, Artificial Sequence
  Synthetic
gatgaacagccactggggcc

SEQ ID NO: 1020 - DNA, 20 bp, Artificial Sequence
  Synthetic
gtgagcggcctctttatatg

SEQ ID NO: 1021 - DNA, 20 bp, Artificial Sequence
  Synthetic
ccctgcgcgggtggtatcag

SEQ ID NO: 1022 - DNA, 20 bp, Artificial Sequence
  Synthetic
gctcatgcctgagctggccc

SEQ ID NO: 1023 - DNA, 20 bp, Artificial Sequence
  Synthetic
aaggtacacatggtaggata

SEQ ID NO: 1024 - DNA, 20 bp, Artificial Sequence
  Synthetic
ggtccaaggcccaggctgga

SEQ ID NO: 1025 - DNA, 20 bp, Artificial Sequence
  Synthetic
gtggccgtacagggagattg

SEQ ID NO: 1026 - DNA, 20 bp, Artificial Sequence
  Synthetic
ggcctgatggagccacccca

SEQ ID NO: 1027 - DNA, 20 bp, Artificial Sequence
  Synthetic
agagaccgccaacatgtcac

SEQ ID NO: 1028 - DNA, 20 bp, Artificial Sequence
  Synthetic
gtgagatccgccctttccag

SEQ ID NO: 1029 - DNA, 20 bp, Artificial Sequence
  Synthetic
tcgaccggcagacaggccct

SEQ ID NO: 1030 - DNA, 20 bp, Artificial Sequence
  Synthetic
caacgtgccggtctgtgtgc

SEQ ID NO: 1031 - DNA, 20 bp, Artificial Sequence
  Synthetic
ctgacaggcgttgtcggaga

SEQ ID NO: 1032 - DNA, 20 bp, Artificial Sequence
  Synthetic
aaaacctacgccatgggtgg

SEQ ID NO: 1033 - DNA, 20 bp, Artificial Sequence
  Synthetic
gccaacagactgatttcctg

SEQ ID NO: 1034 - DNA, 20 bp, Artificial Sequence
  Synthetic
aaccccggctgttgttacca

SEQ ID NO: 1035 - DNA, 20 bp, Artificial Sequence
  Synthetic
ggctgtcctctccagctcca

SEQ ID NO: 1036 - DNA, 20 bp, Artificial Sequence
  Synthetic
gcaggacccggaagccatcc

SEQ ID NO: 1037 - DNA, 20 bp, Artificial Sequence
  Synthetic
ataacgaatgccccatcgat

SEQ ID NO: 1038 - DNA, 20 bp, Artificial Sequence
  Synthetic
aaattcgcaagtatgtctta

SEQ ID NO: 1039 - DNA, 20 bp, Artificial Sequence
  Synthetic
tcgtggtgccgctactgggc

SEQ ID NO: 1040 - DNA, 20 bp, Artificial Sequence
  Synthetic
tggcatcgttgatgacattc

SEQ ID NO: 1041 - DNA, 20 bp, Artificial Sequence
  Synthetic
ttgatacaagcccaggaaat

SEQ ID NO: 1042 - DNA, 20 bp, Artificial Sequence
  Synthetic
aggctgccacgcgggagacc

SEQ ID NO: 1043 - DNA, 20 bp, Artificial Sequence
  Synthetic
agagcccggccaagtgctgc

SEQ ID NO: 1044 - DNA, 20 bp, Artificial Sequence
  Synthetic
gaagaccgccgaggtgggcg

SEQ ID NO: 1045 - DNA, 20 bp, Artificial Sequence
  Synthetic
gagggcccggagcccctgag

SEQ ID NO: 1046 - DNA, 20 bp, Artificial Sequence
  Synthetic
catacaaagaggccactcac

SEQ ID NO: 1047 - DNA, 20 bp, Artificial Sequence
  Synthetic
gaggcacagggcatgggtga

SEQ ID NO: 1048 - DNA, 20 bp, Artificial Sequence
  Synthetic
tcagtcatgctgtcacaact

SEQ ID NO: 1049 - DNA, 20 bp, Artificial Sequence
  Synthetic
ggcaccgtgcgagttggcag

SEQ ID NO: 1050 - DNA, 20 bp, Artificial Sequence
  Synthetic
gcataccggcggatggtcca

SEQ ID NO: 1051 - DNA, 20 bp, Artificial Sequence
  Synthetic
aagaggatcccggatgctgc

SEQ ID NO: 1052 - DNA, 20 bp, Artificial Sequence
  Synthetic
cttggcttcctgggtgagaa

SEQ ID NO: 1053 - DNA, 20 bp, Artificial Sequence
  Synthetic
catgacgcaggcgctgctgg

SEQ ID NO: 1054 - DNA, 20 bp, Artificial Sequence
  Synthetic
cacacggctgagacgttcca

SEQ ID NO: 1055 - DNA, 20 bp, Artificial Sequence
  Synthetic
taaggacccgcagcaccggc

SEQ ID NO: 1056 - DNA, 20 bp, Artificial Sequence
  Synthetic
gcggctctggaaccagacct

SEQ ID NO: 1057 - DNA, 20 bp, Artificial Sequence
  Synthetic
ccgatccgcacctggtgcgt

SEQ ID NO: 1058 - DNA, 20 bp, Artificial Sequence
  Synthetic
gagctgcccgccgaagaagc

SEQ ID NO: 1059 - DNA, 20 bp, Artificial Sequence
  Synthetic
ccacacctgtgacggctctg

SEQ ID NO: 1060 - DNA, 20 bp, Artificial Sequence
  Synthetic
gaccctcatcggcaacagca

SEQ ID NO: 1061 - DNA, 20 bp, Artificial Sequence
  Synthetic
ccactgcgctgcccgcgcag

SEQ ID NO: 1062 - DNA, 20 bp, Artificial Sequence
  Synthetic
cgcccgtggcccggctgctg

SEQ ID NO: 1063 - DNA, 20 bp, Artificial Sequence
  Synthetic
gatgctggcgcccggctggc

SEQ ID NO: 1064 - DNA, 20 bp, Artificial Sequence
  Synthetic
ggaccatgcctggacgccca

SEQ ID NO: 1065 - DNA, 20 bp, Artificial Sequence
  Synthetic
tgtcaagagagcgaatgtca

SEQ ID NO: 1066 - DNA, 20 bp, Artificial Sequence
  Synthetic
ctggccggaccgaggaacca

SEQ ID NO: 1067 - DNA, 20 bp, Artificial Sequence
  Synthetic
cgctctcggcaaagaacgct

SEQ ID NO: 1068 - DNA, 20 bp, Artificial Sequence
  Synthetic
tagatttccatggggaagta

SEQ ID NO: 1069 - DNA, 20 bp, Artificial Sequence
  Synthetic
tgcgccgcctcgaggccttg

SEQ ID NO: 1070 - DNA, 20 bp, Artificial Sequence
  Synthetic
gcactccgcagcagtgggcc

SEQ ID NO: 1071 - DNA, 20 bp, Artificial Sequence
  Synthetic
ggcacagtggaagatctatg

SEQ ID NO: 1072 - DNA, 20 bp, Artificial Sequence
  Synthetic
ctgccggatccccctgctga

SEQ ID NO: 1073 - DNA, 20 bp, Artificial Sequence
  Synthetic
gtacactgggtgatcctgca

SEQ ID NO: 1074 - DNA, 20 bp, Artificial Sequence
  Synthetic
attcggaagaatgaacagaa

SEQ ID NO: 1075 - DNA, 20 bp, Artificial Sequence
  Synthetic
ggggtctcgataataaaatt

SEQ ID NO: 1076 - DNA, 20 bp, Artificial Sequence
  Synthetic
acatcgactttaaatgactt

SEQ ID NO: 1077 - DNA, 20 bp, Artificial Sequence
  Synthetic
gccacttccagaactgcccg

SEQ ID NO: 1078 - DNA, 20 bp, Artificial Sequence
  Synthetic
ccaacctgacccgcttcttc

SEQ ID NO: 1079 - DNA, 20 bp, Artificial Sequence
  Synthetic
cctgtaccgcacgctgtact

SEQ ID NO: 1080 - DNA, 20 bp, Artificial Sequence
  Synthetic
cgtgccggcctcgcgcatgg

SEQ ID NO: 1081 - DNA, 20 bp, Artificial Sequence
  Synthetic
tcactgagccagggaactat

SEQ ID NO: 1082 - DNA, 20 bp, Artificial Sequence
  Synthetic
cgcgcccggaggaggaaatc

SEQ ID NO: 1083 - DNA, 20 bp, Artificial Sequence
  Synthetic
gccgctcacgcagcttgcgc

SEQ ID NO: 1084 - DNA, 20 bp, Artificial Sequence
  Synthetic
gcgcagttcctcccgctcgc

SEQ ID NO: 1085 - DNA, 20 bp, Artificial Sequence
  Synthetic
cctccttcacctgcttgagg

SEQ ID NO: 1086 - DNA, 20 bp, Artificial Sequence
  Synthetic
tgaacctgcaaccggttcta

SEQ ID NO: 1087 - DNA, 20 bp, Artificial Sequence
  Synthetic
gcgcctggccagccctccac

SEQ ID NO: 1088 - DNA, 20 bp, Artificial Sequence
  Synthetic
catgccgctagaggaggaaa

SEQ ID NO: 1089 - DNA, 20 bp, Artificial Sequence
  Synthetic
acgcccgtggtatgttatgc

SEQ ID NO: 1090 - DNA, 20 bp, Artificial Sequence
  Synthetic
tatccgctgctcaagggact

SEQ ID NO: 1091 - DNA, 20 bp, Artificial Sequence
  Synthetic
gcgccgagcggggttcatgt

SEQ ID NO: 1092 - DNA, 20 bp, Artificial Sequence
  Synthetic
tggccacgaccaagcccgac

SEQ ID NO: 1093 - DNA, 20 bp, Artificial Sequence
  Synthetic
gctcttcccgacactgcagc

SEQ ID NO: 1094 - DNA, 20 bp, Artificial Sequence
  Synthetic
tgaagcagcacacgatggcc

SEQ ID NO: 1095 - DNA, 20 bp, Artificial Sequence
  Synthetic
tgcagcagccgcccttctgc

SEQ ID NO: 1096 - DNA, 20 bp, Artificial Sequence
  Synthetic
gtgcagccgggctcgctgct

SEQ ID NO: 1097 - DNA, 20 bp, Artificial Sequence
  Synthetic
ctcacctccaacatcactgc

SEQ ID NO: 1098 - DNA, 20 bp, Artificial Sequence
  Synthetic
aatacgtgctgaaaatgata

SEQ ID NO: 1099 - DNA, 20 bp, Artificial Sequence
  Synthetic
agaaatacgatggggcgctc

SEQ ID NO: 1100 - DNA, 20 bp, Artificial Sequence
  Synthetic
gcgacaggcctggaaaacca

SEQ ID NO: 1101 - DNA, 20 bp, Artificial Sequence
  Synthetic
gctctcgcgagccgccttgg

SEQ ID NO: 1102 - DNA, 20 bp, Artificial Sequence
  Synthetic
cccaccgctcctgtgacagc

SEQ ID NO: 1103 - DNA, 20 bp, Artificial Sequence
  Synthetic
gacacgaagcacacacaata

SEQ ID NO: 1104 - DNA, 20 bp, Artificial Sequence
  Synthetic
cagccatggccaggccccag

SEQ ID NO: 1105 - DNA, 20 bp, Artificial Sequence
  Synthetic
cttcctgctgcggtccccaa

SEQ ID NO: 1106 - DNA, 20 bp, Artificial Sequence
  Synthetic
ttccggagtatcggccatgg

SEQ ID NO: 1107 - DNA, 20 bp, Artificial Sequence
  Synthetic
tccatcgtggcccaggaagg

SEQ ID NO: 1108 - DNA, 20 bp, Artificial Sequence
  Synthetic
ccatgacgcaggcgctgctg

SEQ ID NO: 1109 - DNA, 20 bp, Artificial Sequence
  Synthetic
actcacgctggcggtcatgc

SEQ ID NO: 1110 - DNA, 20 bp, Artificial Sequence
  Synthetic
ctgcaccggtacacgggcga

SEQ ID NO: 1111 - DNA, 20 bp, Artificial Sequence
  Synthetic
acagcggcagctgccagtga

SEQ ID NO: 1112 - DNA, 20 bp, Artificial Sequence
  Synthetic
ccaagtttcaggatgcttct

SEQ ID NO: 1113 - DNA, 20 bp, Artificial Sequence
  Synthetic
gggccctggcccacgtacgg

SEQ ID NO: 1114 - DNA, 20 bp, Artificial Sequence
  Synthetic
gcagcccctcggtctgcaac

SEQ ID NO: 1115 - DNA, 20 bp, Artificial Sequence
  Synthetic
aaactccgtccccatggccg

SEQ ID NO: 1116 - DNA, 20 bp, Artificial Sequence
  Synthetic
aggcgtcgaccagcgagtac

SEQ ID NO: 1117 - DNA, 20 bp, Artificial Sequence
  Synthetic
ggagacggcctccatgaagg

SEQ ID NO: 1118 - DNA, 20 bp, Artificial Sequence
  Synthetic
gcccgccttgtgtccaagaa

SEQ ID NO: 1119 - DNA, 20 bp, Artificial Sequence
  Synthetic
actctgctgttcggaactac

SEQ ID NO: 1120 - DNA, 20 bp, Artificial Sequence
  Synthetic
cagtgccgcctgcattcgcg

SEQ ID NO: 1121 - DNA, 20 bp, Artificial Sequence
  Synthetic
ggacccgcctgtggatgcag

SEQ ID NO: 1122 - DNA, 20 bp, Artificial Sequence
  Synthetic
taagccctgccagccaagct

SEQ ID NO: 1123 - DNA, 20 bp, Artificial Sequence
  Synthetic
tgcacagggaattccaagaa

SEQ ID NO: 1124 - DNA, 20 bp, Artificial Sequence
  Synthetic
cctgccggccaactccaaag

SEQ ID NO: 1125 - DNA, 20 bp, Artificial Sequence
  Synthetic
agaacatcactgggggctac

SEQ ID NO: 1126 - DNA, 20 bp, Artificial Sequence
  Synthetic
caggtggggcccgggcatcc

SEQ ID NO: 1127 - DNA, 20 bp, Artificial Sequence
  Synthetic
ggtagattccaatggcttct

SEQ ID NO: 1128 - DNA, 20 bp, Artificial Sequence
  Synthetic
gaccactgcgctgcccgcgc

SEQ ID NO: 1129 - DNA, 20 bp, Artificial Sequence
  Synthetic
cctgggctgctgcgccagca

SEQ ID NO: 1130 - DNA, 20 bp, Artificial Sequence
  Synthetic
tgcacctgccgtgggtgcag

SEQ ID NO: 1131 - DNA, 20 bp, Artificial Sequence
  Synthetic
acgtggttgtggtcgttctg

SEQ ID NO: 1132 - DNA, 20 bp, Artificial Sequence
  Synthetic
gtaccggacagacgtgagcg

SEQ ID NO: 1133 - DNA, 20 bp, Artificial Sequence
  Synthetic
cactggggaccgcagcaaga

SEQ ID NO: 1134 - DNA, 20 bp, Artificial Sequence
  Synthetic
cagggcgtcacggtcggtat

SEQ ID NO: 1135 - DNA, 20 bp, Artificial Sequence
  Synthetic
tcatccgtttgcctgctaag

SEQ ID NO: 1136 - DNA, 20 bp, Artificial Sequence
  Synthetic
cttggcctcgagcctcagcg

SEQ ID NO: 1137 - DNA, 20 bp, Artificial Sequence
  Synthetic
cgccgccattaccccggcca

SEQ ID NO: 1138 - DNA, 20 bp, Artificial Sequence
  Synthetic
cgagtattcgcgctccggcg

SEQ ID NO: 1139 - DNA, 20 bp, Artificial Sequence
  Synthetic
tgccacgagccttcacctta

SEQ ID NO: 1140 - DNA, 20 bp, Artificial Sequence
  Synthetic
tgctgcactgccaattgctg

SEQ ID NO: 1141 - DNA, 20 bp, Artificial Sequence
  Synthetic
gccctccgtgtgctcaaggg

SEQ ID NO: 1142 - DNA, 20 bp, Artificial Sequence
  Synthetic
ggcccacaggtgcagttcca

SEQ ID NO: 1143 - DNA, 20 bp, Artificial Sequence
  Synthetic
gataagtctaccatcctgcg

SEQ ID NO: 1144 - DNA, 20 bp, Artificial Sequence
  Synthetic
gagaccacaagaggcagagc

SEQ ID NO: 1145 - DNA, 20 bp, Artificial Sequence
  Synthetic
aaccagagtaatagcgggtc

SEQ ID NO: 1146 - DNA, 20 bp, Artificial Sequence
  Synthetic
ttgctctcgattcgacttaa

SEQ ID NO: 1147 - DNA, 20 bp, Artificial Sequence
  Synthetic
tgcaaccttggcctcgaggg

SEQ ID NO: 1148 - DNA, 20 bp, Artificial Sequence
  Synthetic
gacatcgactttaaatgact

SEQ ID NO: 1149 - DNA, 20 bp, Artificial Sequence
  Synthetic
aattcacgcattcagactcg

SEQ ID NO: 1150 - DNA, 20 bp, Artificial Sequence
  Synthetic
tgacaggcagcctgcactgg

SEQ ID NO: 1151 - DNA, 20 bp, Artificial Sequence
  Synthetic
cacacacaccacgccctctt

SEQ ID NO: 1152 - DNA, 20 bp, Artificial Sequence
  Synthetic
ggcgcttccggggggcctca

SEQ ID NO: 1153 - DNA, 20 bp, Artificial Sequence
  Synthetic
aagcgctccttcttcgatgt

SEQ ID NO: 1154 - DNA, 20 bp, Artificial Sequence
  Synthetic
tgaccgtactgaaaaacaaa

SEQ ID NO: 1155 - DNA, 20 bp, Artificial Sequence
  Synthetic
ggattttatccgctgctcaa

SEQ ID NO: 1156 - DNA, 20 bp, Artificial Sequence
  Synthetic
ggacctgcccaacgtgaaga

SEQ ID NO: 1157 - DNA, 20 bp, Artificial Sequence
  Synthetic
gcggcaacggtgtagcggcg

SEQ ID NO: 1158 - DNA, 20 bp, Artificial Sequence
  Synthetic
gttcggcttgtggtgtaatt

SEQ ID NO: 1159 - DNA, 20 bp, Artificial Sequence
  Synthetic
gacacacagcgtgacctgag

SEQ ID NO: 1160 - DNA, 20 bp, Artificial Sequence
  Synthetic
gaggcgacagaaggagctca

SEQ ID NO: 1161 - DNA, 20 bp, Artificial Sequence
  Synthetic
ctgctcagaggcagggtgta

SEQ ID NO: 1162 - DNA, 20 bp, Artificial Sequence
  Synthetic
gggaacccgctgctcaccac

SEQ ID NO: 1163 - DNA, 20 bp, Artificial Sequence
  Synthetic
agccgctggatcccgaaggt

SEQ ID NO: 1164 - DNA, 20 bp, Artificial Sequence
  Synthetic
gagaagacgacccaggtgag

SEQ ID NO: 1165 - DNA, 20 bp, Artificial Sequence
  Synthetic
tactcctgtcagctgattga

SEQ ID NO: 1166 - DNA, 20 bp, Artificial Sequence
  Synthetic
ccacgggcggcaggcgcccg

SEQ ID NO: 1167 - DNA, 20 bp, Artificial Sequence
  Synthetic
ccggacagcttccccaaagg

SEQ ID NO: 1168 - DNA, 20 bp, Artificial Sequence
  Synthetic
cccgctggacctcactcggc

SEQ ID NO: 1169 - DNA, 20 bp, Artificial Sequence
  Synthetic
aggttacaacatcatcagga

SEQ ID NO: 1170 - DNA, 20 bp, Artificial Sequence
  Synthetic
ggtgcacacagaaccattac

SEQ ID NO: 1171 - DNA, 20 bp, Artificial Sequence
  Synthetic
ccgtgctttctggaacgagt

SEQ ID NO: 1172 - DNA, 20 bp, Artificial Sequence
  Synthetic
agaggttccttgagtccttt

SEQ ID NO: 1173 - DNA, 20 bp, Artificial Sequence
  Synthetic
ccagtgccgcctgcattcgc

SEQ ID NO: 1174 - DNA, 20 bp, Artificial Sequence
  Synthetic
gcggctgttttgctatgcag

SEQ ID NO: 1175 - DNA, 20 bp, Artificial Sequence
  Synthetic
ccaagtggctggccaacttc

SEQ ID NO: 1176 - DNA, 20 bp, Artificial Sequence
  Synthetic
ggaaggggaccggtcctggg

SEQ ID NO: 1177 - DNA, 20 bp, Artificial Sequence
  Synthetic
caagaacagcattgcataca

SEQ ID NO: 1178 - DNA, 20 bp, Artificial Sequence
  Synthetic
gaaggagccagaggaaaaac

SEQ ID NO: 1179 - DNA, 20 bp, Artificial Sequence
  Synthetic
cacgttgaccacgatgagga

SEQ ID NO: 1180 - DNA, 20 bp, Artificial Sequence
  Synthetic
atcagtcatgctgtcacaac

SEQ ID NO: 1181 - DNA, 20 bp, Artificial Sequence
  Synthetic
aacggtgtagcggcgggggc

SEQ ID NO: 1182 - DNA, 20 bp, Artificial Sequence
  Synthetic
gcccatggacaggttcgagg

SEQ ID NO: 1183 - DNA, 20 bp, Artificial Sequence
  Synthetic
gcagcacaacactgctgctg

SEQ ID NO: 1184 - DNA, 20 bp, Artificial Sequence
  Synthetic
gccgctactgctcagcctgc

SEQ ID NO: 1185 - DNA, 20 bp, Artificial Sequence
  Synthetic
ctggagtacccgcatagcca

SEQ ID NO: 1186 - DNA, 20 bp, Artificial Sequence
  Synthetic
aacgctgtccaccgtggagc

SEQ ID NO: 1187 - DNA, 20 bp, Artificial Sequence
  Synthetic
gcgggtagagggtctgcagc

SEQ ID NO: 1188 - DNA, 20 bp, Artificial Sequence
  Synthetic
ttgctgatgttgctggacca

SEQ ID NO: 1189 - DNA, 20 bp, Artificial Sequence
  Synthetic
cggaagatctatgaggaatg

SEQ ID NO: 1190 - DNA, 20 bp, Artificial Sequence
  Synthetic
gcttgtgacatgggcattct

SEQ ID NO: 1191 - DNA, 20 bp, Artificial Sequence
  Synthetic
tctcaatatccaggagttgt

SEQ ID NO: 1192 - DNA, 20 bp, Artificial Sequence
  Synthetic
agtaggccttgccaaagcca

SEQ ID NO: 1193 - DNA, 20 bp, Artificial Sequence
  Synthetic
cccggaggccgcagaggagc

SEQ ID NO: 1194 - DNA, 20 bp, Artificial Sequence
  Synthetic
caggtggtgaccccggtgcc

SEQ ID NO: 1195 - DNA, 20 bp, Artificial Sequence
  Synthetic
tccttttatatttaggggta

SEQ ID NO: 1196 - DNA, 20 bp, Artificial Sequence
  Synthetic
cccaactgagaaccaagaag

SEQ ID NO: 1197 - DNA, 20 bp, Artificial Sequence
  Synthetic
gccgctagacacggacgcgg

SEQ ID NO: 1198 - DNA, 20 bp, Artificial Sequence
  Synthetic
cctgtttgtgcgggagccct

SEQ ID NO: 1199 - DNA, 20 bp, Artificial Sequence
  Synthetic
ctggacgtccacccgcttgg

SEQ ID NO: 1200 - DNA, 20 bp, Artificial Sequence
  Synthetic
gtacagcccgagagagagcc

SEQ ID NO: 1201 - DNA, 20 bp, Artificial Sequence
  Synthetic
cgggcttcttctccctactc

SEQ ID NO: 1202 - DNA, 20 bp, Artificial Sequence
  Synthetic
acccggatatcaagaacttt

SEQ ID NO: 1203 - DNA, 20 bp, Artificial Sequence
  Synthetic
gagctggtgcctggggctcc

SEQ ID NO: 1204 - DNA, 20 bp, Artificial Sequence
  Synthetic
gcccaacgtgaagatggccc

SEQ ID NO: 1205 - DNA, 20 bp, Artificial Sequence
  Synthetic
ttttacagagatcccttccg

SEQ ID NO: 1206 - DNA, 20 bp, Artificial Sequence
  Synthetic
caccgcgaggctaggaggat

SEQ ID NO: 1207 - DNA, 20 bp, Artificial Sequence
  Synthetic
aaaacgtttacagcttccag

SEQ ID NO: 1208 - DNA, 20 bp, Artificial Sequence
  Synthetic
ctccttcacctgcttgaggt

SEQ ID NO: 1209 - DNA, 20 bp, Artificial Sequence
  Synthetic
cggacagcttccccaaaggt

SEQ ID NO: 1210 - DNA, 20 bp, Artificial Sequence
  Synthetic
ccacatgcactcgcgtgtgg

SEQ ID NO: 1211 - DNA, 20 bp, Artificial Sequence
  Synthetic
cgagtcagatctgcaatctg

SEQ ID NO: 1212 - DNA, 20 bp, Artificial Sequence
  Synthetic
ttccatgggggccatgaggt

SEQ ID NO: 1213 - DNA, 20 bp, Artificial Sequence
  Synthetic
tacctggtccttctcctcag

SEQ ID NO: 1214 - DNA, 20 bp, Artificial Sequence
  Synthetic
cgatggagaggcgtgagcgc

SEQ ID NO: 1215 - DNA, 20 bp, Artificial Sequence
  Synthetic
acggtgacctcaaggcttct

SEQ ID NO: 1216 - DNA, 20 bp, Artificial Sequence
  Synthetic
ccgagtcagatctgcaatct

SEQ ID NO: 1217 - DNA, 20 bp, Artificial Sequence
  Synthetic
cgttgcaatcccttaagcat

SEQ ID NO: 1218 - DNA, 20 bp, Artificial Sequence
  Synthetic
cggagggcatccgcatctgc

SEQ ID NO: 1219 - DNA, 20 bp, Artificial Sequence
  Synthetic
gatcctgtcatcatcatcaa

SEQ ID NO: 1220 - DNA, 20 bp, Artificial Sequence
  Synthetic
ctcatactgtggaatgcctg

SEQ ID NO: 1221 - DNA, 20 bp, Artificial Sequence
  Synthetic
ggaagcaaaccgcaattctt

SEQ ID NO: 1222 - DNA, 20 bp, Artificial Sequence
  Synthetic
aggagcagccacgctcagtg

SEQ ID NO: 1223 - DNA, 20 bp, Artificial Sequence
  Synthetic
cggaggggatggcgcctagg

SEQ ID NO: 1224 - DNA, 20 bp, Artificial Sequence
  Synthetic
ccggggctgcccctggacgc

SEQ ID NO: 1225 - DNA, 20 bp, Artificial Sequence
  Synthetic
atgttcgacagcggaaaccc

SEQ ID NO: 1226 - DNA, 20 bp, Artificial Sequence
  Synthetic
cgcgagaaatctcgaaccag

SEQ ID NO: 1227 - DNA, 20 bp, Artificial Sequence
  Synthetic
gcccaattcctttagcaatg

SEQ ID NO: 1228 - DNA, 20 bp, Artificial Sequence
  Synthetic
cccgggtctgggacaggacc

SEQ ID NO: 1229 - DNA, 20 bp, Artificial Sequence
  Synthetic
gccctgtgccctgcgagcca

SEQ ID NO: 1230 - DNA, 20 bp, Artificial Sequence
  Synthetic
gaccggaggagaactactgc

SEQ ID NO: 1231 - DNA, 20 bp, Artificial Sequence
  Synthetic
tacagtgttcctaaaaggca

SEQ ID NO: 1232 - DNA, 20 bp, Artificial Sequence
  Synthetic
ctcacgcagcttgcgcaggt

SEQ ID NO: 1233 - DNA, 20 bp, Artificial Sequence
  Synthetic
agcccgacccacatcaaggc

SEQ ID NO: 1234 - DNA, 20 bp, Artificial Sequence
  Synthetic
ccctgcctcgcgcattcggc

SEQ ID NO: 1235 - DNA, 20 bp, Artificial Sequence
  Synthetic
taggcacgtcagacccgaac

SEQ ID NO: 1236 - DNA, 20 bp, Artificial Sequence
  Synthetic
tttcagccttagaaatacac

SEQ ID NO: 1237 - DNA, 20 bp, Artificial Sequence
  Synthetic
cgtgacgaaggctatgaaag

SEQ ID NO: 1238 - DNA, 20 bp, Artificial Sequence
  Synthetic
ccagcatcatcccccaggtg

SEQ ID NO: 1239 - DNA, 20 bp, Artificial Sequence
  Synthetic
tatcactcttgaggtctctg

SEQ ID NO: 1240 - DNA, 20 bp, Artificial Sequence
  Synthetic
ccctgaggcagacgaggcac

SEQ ID NO: 1241 - DNA, 20 bp, Artificial Sequence
  Synthetic
aagccgctggatcccgaagg

SEQ ID NO: 1242 - DNA, 20 bp, Artificial Sequence
  Synthetic
aaaccgcaagtttggctttt

SEQ ID NO: 1243 - DNA, 20 bp, Artificial Sequence
  Synthetic
cgcactgccatcattgccca

SEQ ID NO: 1244 - DNA, 20 bp, Artificial Sequence
  Synthetic
ccaggcaggaggctcgggtg

SEQ ID NO: 1245 - DNA, 20 bp, Artificial Sequence
  Synthetic
gtggaggacacgcaaaggaa

SEQ ID NO: 1246 - DNA, 20 bp, Artificial Sequence
  Synthetic
ggcgtagtccttcccagaga

SEQ ID NO: 1247 - DNA, 20 bp, Artificial Sequence
  Synthetic
ctacctgtccggggtgctgc

SEQ ID NO: 1248 - DNA, 20 bp, Artificial Sequence
  Synthetic
gcgccacatgcactcgcgtg

SEQ ID NO: 1249 - DNA, 20 bp, Artificial Sequence
  Synthetic
ggaggcacagggcatgggtg

SEQ ID NO: 1250 - DNA, 20 bp, Artificial Sequence
  Synthetic
cttcccggcaggacgcagca

SEQ ID NO: 1251 - DNA, 20 bp, Artificial Sequence
  Synthetic
gcctctcttggacacaaagc

SEQ ID NO: 1252 - DNA, 20 bp, Artificial Sequence
  Synthetic
ggtagcggccggtgccgtct

SEQ ID NO: 1253 - DNA, 20 bp, Artificial Sequence
  Synthetic
agctccgtttcgtgatgttt

SEQ ID NO: 1254 - DNA, 20 bp, Artificial Sequence
  Synthetic
cggcaacggtgtagcggcgg

SEQ ID NO: 1255 - DNA, 20 bp, Artificial Sequence
  Synthetic
ctctggcaaccgctgcctga

SEQ ID NO: 1256 - DNA, 20 bp, Artificial Sequence
  Synthetic
cattcgcacagatgagtaca

SEQ ID NO: 1257 - DNA, 20 bp, Artificial Sequence
  Synthetic
agcggcgcctcaagcagcag

SEQ ID NO: 1258 - DNA, 20 bp, Artificial Sequence
  Synthetic
acctccactgggccgacact

SEQ ID NO: 1259 - DNA, 20 bp, Artificial Sequence
  Synthetic
caatcaatcacttcagagaa

SEQ ID NO: 1260 - DNA, 20 bp, Artificial Sequence
  Synthetic
ggccgacccgctggaggcgc

SEQ ID NO: 1261 - DNA, 20 bp, Artificial Sequence
  Synthetic
gagcccgacccacatcaagg

SEQ ID NO: 1262 - DNA, 20 bp, Artificial Sequence
  Synthetic
attcgcacagatgagtacat

SEQ ID NO: 1263 - DNA, 20 bp, Artificial Sequence
  Synthetic
ctgctctccgccgcctgctg

SEQ ID NO: 1264 - DNA, 20 bp, Artificial Sequence
  Synthetic
atgccggagttcagtttgtt

SEQ ID NO: 1265 - DNA, 20 bp, Artificial Sequence
  Synthetic
ccaccgcctgctggtgaccc

SEQ ID NO: 1266 - DNA, 20 bp, Artificial Sequence
  Synthetic
ccggagcttccggccctctg

SEQ ID NO: 1267 - DNA, 20 bp, Artificial Sequence
  Synthetic
acagtgttcctaaaaggcac

SEQ ID NO: 1268 - DNA, 20 bp, Artificial Sequence
  Synthetic
acaacccggagcgctatggc

SEQ ID NO: 1269 - DNA, 20 bp, Artificial Sequence
  Synthetic
cacaactctgggggaaacca

SEQ ID NO: 1270 - DNA, 20 bp, Artificial Sequence
  Synthetic
agccgattgagactagtgag

SEQ ID NO: 1271 - DNA, 20 bp, Artificial Sequence
  Synthetic
cggcacccgtacctccgggg

SEQ ID NO: 1272 - DNA, 20 bp, Artificial Sequence
  Synthetic
gcagaagaacaccctggcgg

SEQ ID NO: 1273 - DNA, 20 bp, Artificial Sequence
  Synthetic
aaaccgcccggggcaggtgc

SEQ ID NO: 1274 - DNA, 20 bp, Artificial Sequence
  Synthetic
gcgctcggccgcgcgccttg

SEQ ID NO: 1275 - DNA, 20 bp, Artificial Sequence
  Synthetic
cagtgcccggccatgggctg

SEQ ID NO: 1276 - DNA, 20 bp, Artificial Sequence
  Synthetic
ctcggcaaagaacgctggga

SEQ ID NO: 1277 - DNA, 20 bp, Artificial Sequence
  Synthetic
cctcgatgaagcactcgttg

SEQ ID NO: 1278 - DNA, 20 bp, Artificial Sequence
  Synthetic
taacagcgggtcaggcaccg

SEQ ID NO: 1279 - DNA, 20 bp, Artificial Sequence
  Synthetic
gttttctaccttcttttccc

SEQ ID NO: 1280 - DNA, 20 bp, Artificial Sequence
  Synthetic
ccgccatccgcgcgagtacc

SEQ ID NO: 1281 - DNA, 20 bp, Artificial Sequence
  Synthetic
gtcgagctgcaaggggatag

SEQ ID NO: 1282 - DNA, 20 bp, Artificial Sequence
  Synthetic
cggagcttccggccctctgg

SEQ ID NO: 1283 - DNA, 20 bp, Artificial Sequence
  Synthetic
gagtctgggctctgcaaaca

SEQ ID NO: 1284 - DNA, 20 bp, Artificial Sequence
  Synthetic
tccatagcggcagacattaa

SEQ ID NO: 1285 - DNA, 20 bp, Artificial Sequence
  Synthetic
gggcctgatggagccacccc

SEQ ID NO: 1286 - DNA, 20 bp, Artificial Sequence
  Synthetic
tttctgagcagtggctccga

SEQ ID NO: 1287 - DNA, 20 bp, Artificial Sequence
  Synthetic
gcggaggccccggagaggtg

SEQ ID NO: 1288 - DNA, 20 bp, Artificial Sequence
  Synthetic
tgttgttgtcgagctgcaag

SEQ ID NO: 1289 - DNA, 20 bp, Artificial Sequence
  Synthetic
ccggtacacgggcgagggca

SEQ ID NO: 1290 - DNA, 20 bp, Artificial Sequence
  Synthetic
gactacaacccggagcgcta

SEQ ID NO: 1291 - DNA, 20 bp, Artificial Sequence
  Synthetic
ttcccgctgggctactcgga

SEQ ID NO: 1292 - DNA, 20 bp, Artificial Sequence
  Synthetic
atacgggaaaaaggcgtggt

SEQ ID NO: 1293 - DNA, 20 bp, Artificial Sequence
  Synthetic
gcagggcgtcacggtcggta

SEQ ID NO: 1294 - DNA, 20 bp, Artificial Sequence
  Synthetic
gaagctccgccacactgtga

SEQ ID NO: 1295 - DNA, 20 bp, Artificial Sequence
  Synthetic
aaggccgcccggggtaaggt

SEQ ID NO: 1296 - DNA, 20 bp, Artificial Sequence
  Synthetic
ccacacggctgagacgttcc

SEQ ID NO: 1297 - DNA, 20 bp, Artificial Sequence
  Synthetic
gcacagggcatgggtgaggg

SEQ ID NO: 1298 - DNA, 20 bp, Artificial Sequence
  Synthetic
tgcctctcttggacacaaag

SEQ ID NO: 1299 - DNA, 20 bp, Artificial Sequence
  Synthetic
gagccggacactgaaacctt

SEQ ID NO: 1300 - DNA, 20 bp, Artificial Sequence
  Synthetic
ccgttgcaatcccttaagca

SEQ ID NO: 1301 - DNA, 20 bp, Artificial Sequence
  Synthetic
cctcgggcgcacccacgaga

SEQ ID NO: 1302 - DNA, 20 bp, Artificial Sequence
  Synthetic
cccggacttcgagaacgaga

SEQ ID NO: 1303 - DNA, 20 bp, Artificial Sequence
  Synthetic
ccacccgaggcaggggcggc

SEQ ID NO: 1304 - DNA, 20 bp, Artificial Sequence
  Synthetic
ccggaggtaggacccggcgg

SEQ ID NO: 1305 - DNA, 20 bp, Artificial Sequence
  Synthetic
agctactgggtaagggggac

SEQ ID NO: 1306 - DNA, 20 bp, Artificial Sequence
  Synthetic
aagaaaacctacgccatggg

SEQ ID NO: 1307 - DNA, 20 bp, Artificial Sequence
  Synthetic
cgacagggtacttcagggtc

SEQ ID NO: 1308 - DNA, 20 bp, Artificial Sequence
  Synthetic
cctctgtcagggagccctcc

SEQ ID NO: 1309 - DNA, 20 bp, Artificial Sequence
  Synthetic
ctctacccggaccctgcata

SEQ ID NO: 1310 - DNA, 20 bp, Artificial Sequence
  Synthetic
ggctcacgatgagtgcctgg

SEQ ID NO: 1311 - DNA, 20 bp, Artificial Sequence
  Synthetic
aacccgctgctcaccaccgg

SEQ ID NO: 1312 - DNA, 20 bp, Artificial Sequence
  Synthetic
tcaaacgtgcagatgccaat

SEQ ID NO: 1313 - DNA, 20 bp, Artificial Sequence
  Synthetic
gaagccgccgaagtccctgt

SEQ ID NO: 1314 - DNA, 20 bp, Artificial Sequence
  Synthetic
gtccagtcaaaggagcaaag

SEQ ID NO: 1315 - DNA, 20 bp, Artificial Sequence
  Synthetic
caagcgctccttcttcgatg

SEQ ID NO: 1316 - DNA, 20 bp, Artificial Sequence
  Synthetic
ggccgccgcccaacgccatc

SEQ ID NO: 1317 - DNA, 20 bp, Artificial Sequence
  Synthetic
ggcatgcatccgctcatcac

SEQ ID NO: 1318 - DNA, 20 bp, Artificial Sequence
  Synthetic
tgcggcatttgtcctgctcc

SEQ ID NO: 1319 - DNA, 20 bp, Artificial Sequence
  Synthetic
ctgatctcaggtacagtttc

SEQ ID NO: 1320 - DNA, 20 bp, Artificial Sequence
  Synthetic
acgtccagtcaaaggagcaa

SEQ ID NO: 1321 - DNA, 20 bp, Artificial Sequence
  Synthetic
gttgccggcgcgcctcgcag

SEQ ID NO: 1322 - DNA, 20 bp, Artificial Sequence
  Synthetic
gctccggaggtaggacccgg

SEQ ID NO: 1323 - DNA, 20 bp, Artificial Sequence
  Synthetic
ctccggaggtaggacccggc

SEQ ID NO: 1324 - DNA, 20 bp, Artificial Sequence
  Synthetic
tccgggggcccgcccagatc

SEQ ID NO: 1325 - DNA, 20 bp, Artificial Sequence
  Synthetic
gagtaggccttgccaaagcc

SEQ ID NO: 1326 - DNA, 20 bp, Artificial Sequence
  Synthetic
gcgcggcacccgtacctccg

SEQ ID NO: 1327 - DNA, 20 bp, Artificial Sequence
  Synthetic
cgataggcagcctgcactgg

SEQ ID NO: 1328 - DNA, 20 bp, Artificial Sequence
  Synthetic
gtgggccgtgctgtgggagt

SEQ ID NO: 1329 - DNA, 20 bp, Artificial Sequence
  Synthetic
ccgctagacacggacgcggc

SEQ ID NO: 1330 - DNA, 20 bp, Artificial Sequence
  Synthetic
atggaggtgactgggcctac

SEQ ID NO: 1331 - DNA, 20 bp, Artificial Sequence
  Synthetic
gcgccattgggccgtggtcc

SEQ ID NO: 1332 - DNA, 20 bp, Artificial Sequence
  Synthetic
tgaccacctggcttcctact

SEQ ID NO: 1333 - DNA, 20 bp, Artificial Sequence
  Synthetic
atagatccatctggtcctgc

SEQ ID NO: 1334 - DNA, 20 bp, Artificial Sequence
  Synthetic
ttcactctcttaacattcag

SEQ ID NO: 1335 - DNA, 20 bp, Artificial Sequence
  Synthetic
ctgcgacaacaacggttttc

SEQ ID NO: 1336 - DNA, 20 bp, Artificial Sequence
  Synthetic
cacctactccacgaagcgcc

SEQ ID NO: 1337 - DNA, 20 bp, Artificial Sequence
  Synthetic
ggggcaaaggctgtgctcaa

SEQ ID NO: 1338 - DNA, 20 bp, Artificial Sequence
  Synthetic
gccggactcaccaggaccag

SEQ ID NO: 1339 - DNA, 20 bp, Artificial Sequence
  Synthetic
cgctgtcaggtgcaagctct

SEQ ID NO: 1340 - DNA, 20 bp, Artificial Sequence
  Synthetic
gacctatcctaaggtacgtg

SEQ ID NO: 1341 - DNA, 20 bp, Artificial Sequence
  Synthetic
gagttcaagtccccaccaca

SEQ ID NO: 1342 - DNA, 20 bp, Artificial Sequence
  Synthetic
ctacaggcggcaggcgcccg

SEQ ID NO: 1343 - DNA, 20 bp, Artificial Sequence
  Synthetic
ctggctagatatgagaagca

SEQ ID NO: 1344 - DNA, 20 bp, Artificial Sequence
  Synthetic
gtgtcaggggcggcccacga

SEQ ID NO: 1345 - DNA, 20 bp, Artificial Sequence
  Synthetic
tgtagctactgctgctgctg

SEQ ID NO: 1346 - DNA, 20 bp, Artificial Sequence
  Synthetic
cctgtttcatcttgctggca

SEQ ID NO: 1347 - DNA, 20 bp, Artificial Sequence
  Synthetic
cttgagattgctgggatcac

SEQ ID NO: 1348 - DNA, 20 bp, Artificial Sequence
  Synthetic
gcacctacgtctcctggtcg

SEQ ID NO: 1349 - DNA, 20 bp, Artificial Sequence
  Synthetic
aagggatccgcctggtcctc

SEQ ID NO: 1350 - DNA, 20 bp, Artificial Sequence
  Synthetic
gcacatatcccaacagctca

SEQ ID NO: 1351 - DNA, 20 bp, Artificial Sequence
  Synthetic
agatgctgagcccgaagcag

SEQ ID NO: 1352 - DNA, 20 bp, Artificial Sequence
  Synthetic
gacagctcccacgcctacat

SEQ ID NO: 1353 - DNA, 20 bp, Artificial Sequence
  Synthetic
accagcccccctgggcctcc

SEQ ID NO: 1354 - DNA, 20 bp, Artificial Sequence
  Synthetic
tgttgctactgctgctgggc

SEQ ID NO: 1355 - DNA, 20 bp, Artificial Sequence
  Synthetic
tcacgactgggatgaaccac

SEQ ID NO: 1356 - DNA, 20 bp, Artificial Sequence
  Synthetic
cggcgccctatagctgcgcg

SEQ ID NO: 1357 - DNA, 20 bp, Artificial Sequence
  Synthetic
cctgccaagtgaggtccagc

SEQ ID NO: 1358 - DNA, 20 bp, Artificial Sequence
  Synthetic
actgatgctcctggcagccc

SEQ ID NO: 1359 - DNA, 20 bp, Artificial Sequence
  Synthetic
agacttcgggccaggcttga

SEQ ID NO: 1360 - DNA, 20 bp, Artificial Sequence
  Synthetic
cctgaggcgccccacgatgg

SEQ ID NO: 1361 - DNA, 20 bp, Artificial Sequence
  Synthetic
gaagctgagcgacgagggca

SEQ ID NO: 1362 - DNA, 20 bp, Artificial Sequence
  Synthetic
ctgagatctggtttgcaact

SEQ ID NO: 1363 - DNA, 20 bp, Artificial Sequence
  Synthetic
tgtgcaaaagggccaggcag

SEQ ID NO: 1364 - DNA, 20 bp, Artificial Sequence
  Synthetic
actcaggggtcggcaggcag

SEQ ID NO: 1365 - DNA, 20 bp, Artificial Sequence
  Synthetic
gtcgctaggcaaagtggtca

SEQ ID NO: 1366 - DNA, 20 bp, Artificial Sequence
  Synthetic
ctcccattctcccgccatgt

SEQ ID NO: 1367 - DNA, 20 bp, Artificial Sequence
  Synthetic
gtctcagtgcaggatgaggt

SEQ ID NO: 1368 - DNA, 20 bp, Artificial Sequence
  Synthetic
ctacaagctgccagacgggc

SEQ ID NO: 1369 - DNA, 20 bp, Artificial Sequence
  Synthetic
tggcccagcggttcagccac

SEQ ID NO: 1370 - DNA, 20 bp, Artificial Sequence
  Synthetic
cttctatccaggggcgatga

SEQ ID NO: 1371 - DNA, 20 bp, Artificial Sequence
  Synthetic
caattaatcccaaggaacga

SEQ ID NO: 1372 - DNA, 20 bp, Artificial Sequence
  Synthetic
ttagttcagccaccttctag

SEQ ID NO: 1373 - DNA, 20 bp, Artificial Sequence
  Synthetic
gctgcccacctggctgtgga

SEQ ID NO: 1374 - DNA, 20 bp, Artificial Sequence
  Synthetic
ccacacccggccaatgttgt

SEQ ID NO: 1375 - DNA, 20 bp, Artificial Sequence
  Synthetic
ccttcacagctcctgaaagg

SEQ ID NO: 1376 - DNA, 20 bp, Artificial Sequence
  Synthetic
tctttcaggcagcctctttg

SEQ ID NO: 1377 - DNA, 20 bp, Artificial Sequence
  Synthetic
tttgatctccctggtcctgc

SEQ ID NO: 1378 - DNA, 20 bp, Artificial Sequence
  Synthetic
tcttcatccagtgctggtcc

SEQ ID NO: 1379 - DNA, 20 bp, Artificial Sequence
  Synthetic
gcgggaactctcggggcaga

SEQ ID NO: 1380 - DNA, 20 bp, Artificial Sequence
  Synthetic
ggtctacgttcagctggccc

SEQ ID NO: 1381 - DNA, 20 bp, Artificial Sequence
  Synthetic
ccctagtcctccaggcttcc

SEQ ID NO: 1382 - DNA, 20 bp, Artificial Sequence
  Synthetic
agagctaggggggcggtggc

SEQ ID NO: 1383 - DNA, 20 bp, Artificial Sequence
  Synthetic
ccagctaccccagctactgg

SEQ ID NO: 1384 - DNA, 20 bp, Artificial Sequence
  Synthetic
cccgtcctactggggcatca

SEQ ID NO: 1385 - DNA, 20 bp, Artificial Sequence
  Synthetic
tcagggactctgtggggatg

SEQ ID NO: 1386 - DNA, 20 bp, Artificial Sequence
  Synthetic
ccgggactttccagggcccc

SEQ ID NO: 1387 - DNA, 20 bp, Artificial Sequence
  Synthetic
ggatgagcccccaggtcctg

SEQ ID NO: 1388 - DNA, 20 bp, Artificial Sequence
  Synthetic
cgagtaggggagccaccagt

SEQ ID NO: 1389 - DNA, 20 bp, Artificial Sequence
  Synthetic
ctattgggacccagccaaac

SEQ ID NO: 1390 - DNA, 20 bp, Artificial Sequence
  Synthetic
gagtcagtcatcgctaggga

SEQ ID NO: 1391 - DNA, 20 bp, Artificial Sequence
  Synthetic
tccccagaaactggaatctg

SEQ ID NO: 1392 - DNA, 20 bp, Artificial Sequence
  Synthetic
catgtatctcgacatccacg

SEQ ID NO: 1393 - DNA, 20 bp, Artificial Sequence
  Synthetic
cgctgactttgtcttctact

SEQ ID NO: 1394 - DNA, 20 bp, Artificial Sequence
  Synthetic
acgtgatccccctggacccc

SEQ ID NO: 1395 - DNA, 20 bp, Artificial Sequence
  Synthetic
cgccatatacgtggccatcc

SEQ ID NO: 1396 - DNA, 20 bp, Artificial Sequence
  Synthetic
tggggaccatgaggtggggc

SEQ ID NO: 1397 - DNA, 20 bp, Artificial Sequence
  Synthetic
ggagccccaaggcccgctgg

SEQ ID NO: 1398 - DNA, 20 bp, Artificial Sequence
  Synthetic
tctctgaggaacaagactca

SEQ ID NO: 1399 - DNA, 20 bp, Artificial Sequence
  Synthetic
gctgtagcccctgccgctct

SEQ ID NO: 1400 - DNA, 20 bp, Artificial Sequence
  Synthetic
cccagtgaagaaggcaaaag

SEQ ID NO: 1401 - DNA, 20 bp, Artificial Sequence
  Synthetic
agctatgtgatgaagcaggc

SEQ ID NO: 1402 - DNA, 20 bp, Artificial Sequence
  Synthetic
tctgaccctcctggtccccc

SEQ ID NO: 1403 - DNA, 20 bp, Artificial Sequence
  Synthetic
cacatcctatcccaccagtt

SEQ ID NO: 1404 - DNA, 20 bp, Artificial Sequence
  Synthetic
accatccccggccgcctgca

SEQ ID NO: 1405 - DNA, 20 bp, Artificial Sequence
  Synthetic
catcacacccatctttgcct

SEQ ID NO: 1406 - DNA, 20 bp, Artificial Sequence
  Synthetic
aatcagtgggccatggtgac

SEQ ID NO: 1407 - DNA, 20 bp, Artificial Sequence
  Synthetic
ctttgcatccacacagagtc

SEQ ID NO: 1408 - DNA, 20 bp, Artificial Sequence
  Synthetic
actagccctccaggacctgc

SEQ ID NO: 1409 - DNA, 20 bp, Artificial Sequence
  Synthetic
tgctgaccaaccaggagaga

SEQ ID NO: 1410 - DNA, 20 bp, Artificial Sequence
  Synthetic
agcgattctccaggcaagga

SEQ ID NO: 1411 - DNA, 20 bp, Artificial Sequence
  Synthetic
aatcaggcttccctggcttg

SEQ ID NO: 1412 - DNA, 20 bp, Artificial Sequence
  Synthetic
cctaccgcagcctgttataa

SEQ ID NO: 1413 - DNA, 20 bp, Artificial Sequence
  Synthetic
ccaccagccctccctgtggt

SEQ ID NO: 1414 - DNA, 20 bp, Artificial Sequence
  Synthetic
ctcatggctgaagctgtgtt

SEQ ID NO: 1415 - DNA, 20 bp, Artificial Sequence
  Synthetic
tgcggagtctctcggccccc

SEQ ID NO: 1416 - DNA, 20 bp, Artificial Sequence
  Synthetic
ccacaccggggaggtgggct

SEQ ID NO: 1417 - DNA, 20 bp, Artificial Sequence
  Synthetic
acagtacagctcactcagtg

SEQ ID NO: 1418 - DNA, 20 bp, Artificial Sequence
  Synthetic
caggtcaggccagctggggc

SEQ ID NO: 1419 - DNA, 20 bp, Artificial Sequence
  Synthetic
gagcaagccatggcacattg

SEQ ID NO: 1420 - DNA, 20 bp, Artificial Sequence
  Synthetic
aggcctggactgtagagaca

SEQ ID NO: 1421 - DNA, 20 bp, Artificial Sequence
  Synthetic
cttgggtcaggctgattcag

SEQ ID NO: 1422 - DNA, 20 bp, Artificial Sequence
  Synthetic
ttctccccagtggggtctgg

SEQ ID NO: 1423 - DNA, 20 bp, Artificial Sequence
  Synthetic
catttaatcagggtcttgaa

SEQ ID NO: 1424 - DNA, 20 bp, Artificial Sequence
  Synthetic
cgggcacagtgcggatgcgt

SEQ ID NO: 1425 - DNA, 20 bp, Artificial Sequence
  Synthetic
cctgaccccaagggagaccc

SEQ ID NO: 1426 - DNA, 20 bp, Artificial Sequence
  Synthetic
cctgaagtgtctggaccaaa

SEQ ID NO: 1427 - DNA, 20 bp, Artificial Sequence
  Synthetic
ttggctagcagctgctgcag

SEQ ID NO: 1428 - DNA, 20 bp, Artificial Sequence
  Synthetic
gcctgaggccgtggagacag

SEQ ID NO: 1429 - DNA, 20 bp, Artificial Sequence
  Synthetic
tgggtcatcgtctttgaaaa

SEQ ID NO: 1430 - DNA, 20 bp, Artificial Sequence
  Synthetic
agatcagttgtaccagatgc

SEQ ID NO: 1431 - DNA, 20 bp, Artificial Sequence
  Synthetic
gttgagaggctatgtgtgac

SEQ ID NO: 1432 - DNA, 20 bp, Artificial Sequence
  Synthetic
ctcacaggtcccaaaacggt

SEQ ID NO: 1433 - DNA, 20 bp, Artificial Sequence
  Synthetic
gatgttctaggaagctcggc

SEQ ID NO: 1434 - DNA, 20 bp, Artificial Sequence
  Synthetic
ggacctaggcgaggcagtag

SEQ ID NO: 1435 - DNA, 20 bp, Artificial Sequence
  Synthetic
acacagagtgctgagcggtg

SEQ ID NO: 1436 - DNA, 20 bp, Artificial Sequence
  Synthetic
ccctcactggcggcttttcc

SEQ ID NO: 1437 - DNA, 20 bp, Artificial Sequence
  Synthetic
ccagatttgaaaggaaaacg

SEQ ID NO: 1438 - DNA, 20 bp, Artificial Sequence
  Synthetic
gctgagccccaaggtcctcc

SEQ ID NO: 1439 - DNA, 20 bp, Artificial Sequence
  Synthetic
gtcggaggcccctggcaagg

SEQ ID NO: 1440 - DNA, 20 bp, Artificial Sequence
  Synthetic
acaggaccccgctggccagg

SEQ ID NO: 1441 - DNA, 20 bp, Artificial Sequence
  Synthetic
ttgtcatgaagatgcacaat

SEQ ID NO: 1442 - DNA, 20 bp, Artificial Sequence
  Synthetic
tcatcaagaaggtgcctctt

SEQ ID NO: 1443 - DNA, 20 bp, Artificial Sequence
  Synthetic
cctaggagaaagggcttgga

SEQ ID NO: 1444 - DNA, 20 bp, Artificial Sequence
  Synthetic
gctagcggtgatagtcagcc

SEQ ID NO: 1445 - DNA, 20 bp, Artificial Sequence
  Synthetic
gagagctgatagaagactct

SEQ ID NO: 1446 - DNA, 20 bp, Artificial Sequence
  Synthetic
cctcaactgccagactgcag

SEQ ID NO: 1447 - DNA, 20 bp, Artificial Sequence
  Synthetic
tgctaggtgaccttggcctc

SEQ ID NO: 1448 - DNA, 20 bp, Artificial Sequence
  Synthetic
cgagtctagccatccgctgt

SEQ ID NO: 1449 - DNA, 20 bp, Artificial Sequence
  Synthetic
cccagcatcggctccgtctc

SEQ ID NO: 1450 - DNA, 20 bp, Artificial Sequence
  Synthetic
ggggacgcaggcctggagaa

SEQ ID NO: 1451 - DNA, 20 bp, Artificial Sequence
  Synthetic
tcgctagcggcttttcctgg

SEQ ID NO: 1452 - DNA, 20 bp, Artificial Sequence
  Synthetic
cctggcagcctatgagtcct

SEQ ID NO: 1453 - DNA, 20 bp, Artificial Sequence
  Synthetic
acctcaggcacggcagtgga

SEQ ID NO: 1454 - DNA, 20 bp, Artificial Sequence
  Synthetic
tcctgtaggagtttgccagc

SEQ ID NO: 1455 - DNA, 20 bp, Artificial Sequence
  Synthetic
taaagggcatgctcatctcc

SEQ ID NO: 1456 - DNA, 20 bp, Artificial Sequence
  Synthetic
gaagagatcgcctggtgccc

SEQ ID NO: 1457 - DNA, 20 bp, Artificial Sequence
  Synthetic
aaagacctccgaggaatccc

SEQ ID NO: 1458 - DNA, 20 bp, Artificial Sequence
  Synthetic
gctgcatgtctctgcgtcca

SEQ ID NO: 1459 - DNA, 20 bp, Artificial Sequence
  Synthetic
cactatcttgccccaggctc

SEQ ID NO: 1460 - DNA, 20 bp, Artificial Sequence
  Synthetic
taccttaacaagctcccgtg

SEQ ID NO: 1461 - DNA, 20 bp, Artificial Sequence
  Synthetic
cgtgcaggaaagagcagtgg

SEQ ID NO: 1462 - DNA, 20 bp, Artificial Sequence
  Synthetic
tctagctgagatccgggaga

SEQ ID NO: 1463 - DNA, 20 bp, Artificial Sequence
  Synthetic
catcagggacgcccaggcta

SEQ ID NO: 1464 - DNA, 20 bp, Artificial Sequence
  Synthetic
cccttcgagctggtagcgcc

SEQ ID NO: 1465 - DNA, 20 bp, Artificial Sequence
  Synthetic
aggcagaaaccagtgcaagc

SEQ ID NO: 1466 - DNA, 20 bp, Artificial Sequence
  Synthetic
taccacctgctggaggggtc

SEQ ID NO: 1467 - DNA, 20 bp, Artificial Sequence
  Synthetic
tcaggtcattccatggggga

SEQ ID NO: 1468 - DNA, 20 bp, Artificial Sequence
  Synthetic
ccggatgatatgggaaagaa

SEQ ID NO: 1469 - DNA, 20 bp, Artificial Sequence
  Synthetic
catcaagtggcatatctatc

SEQ ID NO: 1470 - DNA, 20 bp, Artificial Sequence
  Synthetic
gctgaagaaaaaggcaacaa

SEQ ID NO: 1471 - DNA, 20 bp, Artificial Sequence
  Synthetic
cccagttcttctgcacatat

SEQ ID NO: 1472 - DNA, 20 bp, Artificial Sequence
  Synthetic
gcaccaagaacacgccccag

SEQ ID NO: 1473 - DNA, 20 bp, Artificial Sequence
  Synthetic
attttaagggtcagggtttg

SEQ ID NO: 1474 - DNA, 20 bp, Artificial Sequence
  Synthetic
gaataagatcgaggacttga

SEQ ID NO: 1475 - DNA, 20 bp, Artificial Sequence
  Synthetic
gctcagaatggctgggtctc

SEQ ID NO: 1476 - DNA, 20 bp, Artificial Sequence
  Synthetic
ggtcaagggaccggaatttg

SEQ ID NO: 1477 - DNA, 20 bp, Artificial Sequence
  Synthetic
caaggacagctactggacgc

SEQ ID NO: 1478 - DNA, 20 bp, Artificial Sequence
  Synthetic
ccacgccagggaggtgggct

SEQ ID NO: 1479 - DNA, 20 bp, Artificial Sequence
  Synthetic
gtgccagctacagggaagga

SEQ ID NO: 1480 - DNA, 20 bp, Artificial Sequence
  Synthetic
accagacatgccaggtccta

SEQ ID NO: 1481 - DNA, 20 bp, Artificial Sequence
  Synthetic
gccaatcctattcagggcca

SEQ ID NO: 1482 - DNA, 20 bp, Artificial Sequence
  Synthetic
aattcagtgaatgtagtatt

SEQ ID NO: 1483 - DNA, 20 bp, Artificial Sequence
  Synthetic
tgctcagtacatggtgctga

SEQ ID NO: 1484 - DNA, 20 bp, Artificial Sequence
  Synthetic
tgcactcaagtctgcacatc

SEQ ID NO: 1485 - DNA, 20 bp, Artificial Sequence
  Synthetic
cctgggagcattggagattt

SEQ ID NO: 1486 - DNA, 20 bp, Artificial Sequence
  Synthetic
cagaggtctccaggtttgcc

SEQ ID NO: 1487 - DNA, 20 bp, Artificial Sequence
  Synthetic
atgttgctattgctgctgtt

SEQ ID NO: 1488 - DNA, 20 bp, Artificial Sequence
  Synthetic
actcaaggtactggcgctgg

SEQ ID NO: 1489 - DNA, 20 bp, Artificial Sequence
  Synthetic
gcccaatgttatcgagatga

SEQ ID NO: 1490 - DNA, 20 bp, Artificial Sequence
  Synthetic
aattacttttgcctagtgct

SEQ ID NO: 1491 - DNA, 20 bp, Artificial Sequence
  Synthetic
cgagcaactccgcatccctg

SEQ ID NO: 1492 - DNA, 20 bp, Artificial Sequence
  Synthetic
gaaatagctgagcatcaatg

SEQ ID NO: 1493 - DNA, 20 bp, Artificial Sequence
  Synthetic
caccgacccgcaggagactg

SEQ ID NO: 1494 - DNA, 20 bp, Artificial Sequence
  Synthetic
caagaccaacaggcctttcc

SEQ ID NO: 1495 - DNA, 20 bp, Artificial Sequence
  Synthetic
acctactcccccaggaactc

SEQ ID NO: 1496 - DNA, 20 bp, Artificial Sequence
  Synthetic
tgactacagcttgtaccccc

SEQ ID NO: 1497 - DNA, 20 bp, Artificial Sequence
  Synthetic
ccccgccaagttcacccctg

SEQ ID NO: 1498 - DNA, 20 bp, Artificial Sequence
  Synthetic
gttctagaacattaacccga

SEQ ID NO: 1499 - DNA, 20 bp, Artificial Sequence
  Synthetic
atgatgtccctgcagctgcg

SEQ ID NO: 1500 - DNA, 20 bp, Artificial Sequence
  Synthetic
atcagctggagttgttgttc

SEQ ID NO: 1501 - DNA, 20 bp, Artificial Sequence
  Synthetic
ccagatcctcctgggccatc

SEQ ID NO: 1502 - DNA, 20 bp, Artificial Sequence
  Synthetic
cccaggctcccaggcagggc

SEQ ID NO: 1503 - DNA, 20 bp, Artificial Sequence
  Synthetic
cctcatcccaggcaaaaatg

SEQ ID NO: 1504 - DNA, 20 bp, Artificial Sequence
  Synthetic
gaaggccgaccggtcggcga

SEQ ID NO: 1505 - DNA, 20 bp, Artificial Sequence
  Synthetic
ccctacagggccccaggccc

SEQ ID NO: 1506 - DNA, 20 bp, Artificial Sequence
  Synthetic
ctcccaggtcatctctgcca

SEQ ID NO: 1507 - DNA, 20 bp, Artificial Sequence
  Synthetic
acgtgcagcggaaggctgat

SEQ ID NO: 1508 - DNA, 20 bp, Artificial Sequence
  Synthetic
gttcccacgcatacacgtct

SEQ ID NO: 1509 - DNA, 20 bp, Artificial Sequence
  Synthetic
ccttagtctggccagttctt

SEQ ID NO: 1510 - DNA, 20 bp, Artificial Sequence
  Synthetic
cttctagagggtgctgttca

SEQ ID NO: 1511 - DNA, 20 bp, Artificial Sequence
  Synthetic
gagccggacaacccgggcaa

SEQ ID NO: 1512 - DNA, 20 bp, Artificial Sequence
  Synthetic
cccgccacgccaggaatgtc

SEQ ID NO: 1513 - DNA, 20 bp, Artificial Sequence
  Synthetic
cctcaggtggcccaacggcc

SEQ ID NO: 1514 - DNA, 20 bp, Artificial Sequence
  Synthetic
accacctaggccagcttgaa

SEQ ID NO: 1515 - DNA, 20 bp, Artificial Sequence
  Synthetic
ttgtgatggccacaaccatg

SEQ ID NO: 1516 - DNA, 20 bp, Artificial Sequence
  Synthetic
cgtggatcacgcctgggggc

SEQ ID NO: 1517 - DNA, 20 bp, Artificial Sequence
  Synthetic
gctagctccaaaggagagag

SEQ ID NO: 1518 - DNA, 20 bp, Artificial Sequence
  Synthetic
ggttccccagatgattctgg

SEQ ID NO: 1519 - DNA, 20 bp, Artificial Sequence
  Synthetic
gctactgcaacacagccacc

SEQ ID NO: 1520 - DNA, 20 bp, Artificial Sequence
  Synthetic
ggactacatctgtggctgga

SEQ ID NO: 1521 - DNA, 20 bp, Artificial Sequence
  Synthetic
ccaagtcctcagggtcttct

SEQ ID NO: 1522 - DNA, 20 bp, Artificial Sequence
  Synthetic
gttgtagcggagaagggcag

SEQ ID NO: 1523 - DNA, 20 bp, Artificial Sequence
  Synthetic
gcagcacctgcacatgctgg

SEQ ID NO: 1524 - DNA, 20 bp, Artificial Sequence
  Synthetic
ctgaggctgcccctggacgc

SEQ ID NO: 1525 - DNA, 20 bp, Artificial Sequence
  Synthetic
ctcttagtggctctgctgat

SEQ ID NO: 1526 - DNA, 20 bp, Artificial Sequence
  Synthetic
aatgatgctcagggacctcc

SEQ ID NO: 1527 - DNA, 20 bp, Artificial Sequence
  Synthetic
gaatgatgaaactggacctc

SEQ ID NO: 1528 - DNA, 20 bp, Artificial Sequence
  Synthetic
gccgctagacaatgggagtg

SEQ ID NO: 1529 - DNA, 20 bp, Artificial Sequence
  Synthetic
agacctctagaagtccttga

SEQ ID NO: 1530 - DNA, 20 bp, Artificial Sequence
  Synthetic
cctttagagtagctgcctga

SEQ ID NO: 1531 - DNA, 20 bp, Artificial Sequence
  Synthetic
gcggctacacctgtcatggg

SEQ ID NO: 1532 - DNA, 20 bp, Artificial Sequence
  Synthetic
actgctacccatatatccag

SEQ ID NO: 1533 - DNA, 20 bp, Artificial Sequence
  Synthetic
cctcaaggaccggcaggccc

SEQ ID NO: 1534 - DNA, 20 bp, Artificial Sequence
  Synthetic
gttcgaggagctggtggcag

SEQ ID NO: 1535 - DNA, 20 bp, Artificial Sequence
  Synthetic
gcctcagctctgccctcaac

SEQ ID NO: 1536 - DNA, 20 bp, Artificial Sequence
  Synthetic
ggcctgtagggtttcattaa

SEQ ID NO: 1537 - DNA, 20 bp, Artificial Sequence
  Synthetic
gttcctgcagttgttctcca

SEQ ID NO: 1538 - DNA, 20 bp, Artificial Sequence
  Synthetic
aagcacatgaggcattctgg

SEQ ID NO: 1539 - DNA, 20 bp, Artificial Sequence
  Synthetic
gggctaagtggggtacacgc

SEQ ID NO: 1540 - DNA, 20 bp, Artificial Sequence
  Synthetic
caaaatacttaggagaaaaa

SEQ ID NO: 1541 - DNA, 20 bp, Artificial Sequence
  Synthetic
gtcatctaagacccactcac

SEQ ID NO: 1542 - DNA, 20 bp, Artificial Sequence
  Synthetic
gagggctaagccagcaggtg

SEQ ID NO: 1543 - DNA, 20 bp, Artificial Sequence
  Synthetic
agatacccctccatccggag

SEQ ID NO: 1544 - DNA, 20 bp, Artificial Sequence
  Synthetic
ccgcctccacgtcgcctcca

SEQ ID NO: 1545 - DNA, 20 bp, Artificial Sequence
  Synthetic
caactcacttcagctcctca

SEQ ID NO: 1546 - DNA, 20 bp, Artificial Sequence
  Synthetic
tctatgtcccccgaaggaca

SEQ ID NO: 1547 - DNA, 20 bp, Artificial Sequence
  Synthetic
ccgtcatgtgggtcctgaat

SEQ ID NO: 1548 - DNA, 20 bp, Artificial Sequence
  Synthetic
tttctacttctggaacagct

SEQ ID NO: 1549 - DNA, 20 bp, Artificial Sequence
  Synthetic
tcctgcagcccaggcaggcc

SEQ ID NO: 1550 - DNA, 20 bp, Artificial Sequence
  Synthetic
cgtagtgaaaatggctctcc

SEQ ID NO: 1551 - DNA, 20 bp, Artificial Sequence
  Synthetic
aatatgccaatgcaagtccc

SEQ ID NO: 1552 - DNA, 20 bp, Artificial Sequence
  Synthetic
ctcccctcaaggatcacgtt

SEQ ID NO: 1553 - DNA, 20 bp, Artificial Sequence
  Synthetic
tgcagcccacacctgccgcc

SEQ ID NO: 1554 - DNA, 20 bp, Artificial Sequence
  Synthetic
aacagtgttgttggtcccac

SEQ ID NO: 1555 - DNA, 20 bp, Artificial Sequence
  Synthetic
gatctacaggctcaggcacc

SEQ ID NO: 1556 - DNA, 20 bp, Artificial Sequence
  Synthetic
gtggcagccagcaataggca

SEQ ID NO: 1557 - DNA, 20 bp, Artificial Sequence
  Synthetic
ggcctactttggaggtgatg

SEQ ID NO: 1558 - DNA, 20 bp, Artificial Sequence
  Synthetic
gatcaggggtgtcctcgggg

SEQ ID NO: 1559 - DNA, 20 bp, Artificial Sequence
  Synthetic
ccatagtttggactggatat

SEQ ID NO: 1560 - DNA, 20 bp, Artificial Sequence
  Synthetic
gcaacatctgcactctcgtg

SEQ ID NO: 1561 - DNA, 20 bp, Artificial Sequence
  Synthetic
agcagactggatgggaaacc

SEQ ID NO: 1562 - DNA, 20 bp, Artificial Sequence
  Synthetic
gaacatcctggggacgactc

SEQ ID NO: 1563 - DNA, 20 bp, Artificial Sequence
  Synthetic
cttctcacctgctggatgga

SEQ ID NO: 1564 - DNA, 20 bp, Artificial Sequence
  Synthetic
gggttagaatgacccagata

SEQ ID NO: 1565 - DNA, 20 bp, Artificial Sequence
  Synthetic
ccctgatcccgaaggaggaa

SEQ ID NO: 1566 - DNA, 20 bp, Artificial Sequence
  Synthetic
gcgctacctcgaggccttgg

SEQ ID NO: 1567 - DNA, 20 bp, Artificial Sequence
  Synthetic
cgtgatgaggtcggtcctgc

SEQ ID NO: 1568 - DNA, 20 bp, Artificial Sequence
  Synthetic
tgcggcaggacacttgtgcc

SEQ ID NO: 1569 - DNA, 20 bp, Artificial Sequence
  Synthetic
tgcacgagctcctccggccc

SEQ ID NO: 1570 - DNA, 20 bp, Artificial Sequence
  Synthetic
gtcagtgtaccaggatgcag

SEQ ID NO: 1571 - DNA, 20 bp, Artificial Sequence
  Synthetic
tcactgggcgacgggcccct

SEQ ID NO: 1572 - DNA, 20 bp, Artificial Sequence
  Synthetic
tccaggcggcaagagagaag

SEQ ID NO: 1573 - DNA, 20 bp, Artificial Sequence
  Synthetic
gctttaaggcttgcccaagg

SEQ ID NO: 1574 - DNA, 20 bp, Artificial Sequence
  Synthetic
gagtcctacttggccaggcc

SEQ ID NO: 1575 - DNA, 20 bp, Artificial Sequence
  Synthetic
agtagccctgctggagtccg

SEQ ID NO: 1576 - DNA, 20 bp, Artificial Sequence
  Synthetic
cccagtcctgctggttcccg

SEQ ID NO: 1577 - DNA, 20 bp, Artificial Sequence
  Synthetic
ccaaggccccctggccatcc

SEQ ID NO: 1578 - DNA, 20 bp, Artificial Sequence
  Synthetic
tgcttagggtccagccattc

SEQ ID NO: 1579 - DNA, 20 bp, Artificial Sequence
  Synthetic
tttcaacatggcccatgggc

SEQ ID NO: 1580 - DNA, 20 bp, Artificial Sequence
  Synthetic
ctgcactggggaaggcccgg

SEQ ID NO: 1581 - DNA, 20 bp, Artificial Sequence
  Synthetic
agtctcactccccctcctgc

SEQ ID NO: 1582 - DNA, 20 bp, Artificial Sequence
  Synthetic
ggtcaggccagtgcccatgg

SEQ ID NO: 1583 - DNA, 20 bp, Artificial Sequence
  Synthetic
tatgatggtggttttcaaac

SEQ ID NO: 1584 - DNA, 20 bp, Artificial Sequence
  Synthetic
gcctcagcacacaaagtggt

SEQ ID NO: 1585 - DNA, 20 bp, Artificial Sequence
  Synthetic
aggtccacgcccgtcagctg

SEQ ID NO: 1586 - DNA, 20 bp, Artificial Sequence
  Synthetic
cagggcatgatggtgggcat

SEQ ID NO: 1587 - DNA, 20 bp, Artificial Sequence
  Synthetic
atgtgtgtgaatcctggagg

SEQ ID NO: 1588 - DNA, 20 bp, Artificial Sequence
  Synthetic
ccgctagcccacatgcacag

SEQ ID NO: 1589 - DNA, 20 bp, Artificial Sequence
  Synthetic
ccagaccctcccggtccccc

SEQ ID NO: 1590 - DNA, 20 bp, Artificial Sequence
  Synthetic
tcctacagcgccacaccgct

SEQ ID NO: 1591 - DNA, 20 bp, Artificial Sequence
  Synthetic
gaactattcatactggaagc

SEQ ID NO: 1592 - DNA, 20 bp, Artificial Sequence
  Synthetic
cttaccggacgtcagtgatc

SEQ ID NO: 1593 - DNA, 20 bp, Artificial Sequence
  Synthetic
cctagagctcctggcgagag

SEQ ID NO: 1594 - DNA, 20 bp, Artificial Sequence
  Synthetic
gctgaccctccaggcttccc

SEQ ID NO: 1595 - DNA, 20 bp, Artificial Sequence
  Synthetic
ccctactgtcccacatgggc

SEQ ID NO: 1596 - DNA, 20 bp, Artificial Sequence
  Synthetic
caggcaagcctggctgctgg

SEQ ID NO: 1597 - DNA, 20 bp, Artificial Sequence
  Synthetic
ctcttagccgtgcgtcagga

SEQ ID NO: 1598 - DNA, 20 bp, Artificial Sequence
  Synthetic
tggccatgaggaacaccacg

SEQ ID NO: 1599 - DNA, 20 bp, Artificial Sequence
  Synthetic
gtcagcctcgcttgaccctc

SEQ ID NO: 1600 - DNA, 20 bp, Artificial Sequence
  Synthetic
ggagtcctacaggcctgggc

SEQ ID NO: 1601 - DNA, 20 bp, Artificial Sequence
  Synthetic
ccagatcccagcggttctcc

SEQ ID NO: 1602 - DNA, 20 bp, Artificial Sequence
  Synthetic
tctagtcaggaggatggcaa

SEQ ID NO: 1603 - DNA, 20 bp, Artificial Sequence
  Synthetic
ttccctgagctgtacaaaca

SEQ ID NO: 1604 - DNA, 20 bp, Artificial Sequence
  Synthetic
cccagctgctgtgggtcaga

SEQ ID NO: 1605 - DNA, 20 bp, Artificial Sequence
  Synthetic
aaattctactggcttgtatt

SEQ ID NO: 1606 - DNA, 20 bp, Artificial Sequence
  Synthetic
ggggtcaggggacagccttg

SEQ ID NO: 1607 - DNA, 20 bp, Artificial Sequence
  Synthetic
cggagagagaaaggagaacg

SEQ ID NO: 1608 - DNA, 20 bp, Artificial Sequence
  Synthetic
tgtggaggctgcagctacac

SEQ ID NO: 1609 - DNA, 20 bp, Artificial Sequence
  Synthetic
gtctcatgcctgctcgtggc

SEQ ID NO: 1610 - DNA, 20 bp, Artificial Sequence
  Synthetic
acagctctaagagtgaagac

SEQ ID NO: 1611 - DNA, 20 bp, Artificial Sequence
  Synthetic
ggtatatggcagctttggcc

SEQ ID NO: 1612 - DNA, 20 bp, Artificial Sequence
  Synthetic
agaattagatctggatcatt

SEQ ID NO: 1613 - DNA, 20 bp, Artificial Sequence
  Synthetic
gtggttaaggggacagctgc

SEQ ID NO: 1614 - DNA, 20 bp, Artificial Sequence
  Synthetic
aaaagggctccaggacccaa

SEQ ID NO: 1615 - DNA, 20 bp, Artificial Sequence
  Synthetic
attagtccaccatgttcttc

SEQ ID NO: 1616 - DNA, 20 bp, Artificial Sequence
  Synthetic
gaactagccatcaatactgt

SEQ ID NO: 1617 - DNA, 20 bp, Artificial Sequence
  Synthetic
cacagactgccaggctatct

SEQ ID NO: 1618 - DNA, 20 bp, Artificial Sequence
  Synthetic
cacctacaagtccctgccca

SEQ ID NO: 1619 - DNA, 20 bp, Artificial Sequence
  Synthetic
tggcccacatgttctaccac

SEQ ID NO: 1620 - DNA, 20 bp, Artificial Sequence
  Synthetic
ggactcagttggcaaatcgg

SEQ ID NO: 1621 - DNA, 20 bp, Artificial Sequence
  Synthetic
ggctctacagtgggccggtg

SEQ ID NO: 1622 - DNA, 20 bp, Artificial Sequence
  Synthetic
gggctgatttgccatccgag

SEQ ID NO: 1623 - DNA, 20 bp, Artificial Sequence
  Synthetic
ggagtaggagtacagagacg

SEQ ID NO: 1624 - DNA, 20 bp, Artificial Sequence
  Synthetic
ggtgcagggcggggtggagg

SEQ ID NO: 1625 - DNA, 20 bp, Artificial Sequence
  Synthetic
caagcagaaccggccacccc

SEQ ID NO: 1626 - DNA, 20 bp, Artificial Sequence
  Synthetic
cctgatgcccctggcgctcc

SEQ ID NO: 1627 - DNA, 20 bp, Artificial Sequence
  Synthetic
gctggaggcttaggcttccc

SEQ ID NO: 1628 - DNA, 20 bp, Artificial Sequence
  Synthetic
cctgaagaaagaggaggtct

SEQ ID NO: 1629 - DNA, 20 bp, Artificial Sequence
  Synthetic
gtggactgtgctgtgggagt

SEQ ID NO: 1630 - DNA, 20 bp, Artificial Sequence
  Synthetic
acatttcatccatcctctcc

SEQ ID NO: 1631 - DNA, 20 bp, Artificial Sequence
  Synthetic
tgttcactcagcagcatttg

SEQ ID NO: 1632 - DNA, 20 bp, Artificial Sequence
  Synthetic
tgacttgcacaggtaggggg

SEQ ID NO: 1633 - DNA, 20 bp, Artificial Sequence
  Synthetic
aggggtaaagggtcaaagcg

SEQ ID NO: 1634 - DNA, 20 bp, Artificial Sequence
  Synthetic
ctcctaagaaggggacattg

SEQ ID NO: 1635 - DNA, 20 bp, Artificial Sequence
  Synthetic
gcaccatgggcgtcttcaca

SEQ ID NO: 1636 - DNA, 20 bp, Artificial Sequence
  Synthetic
tcctgatggtaaaggcgaaa

SEQ ID NO: 1637 - DNA, 20 bp, Artificial Sequence
  Synthetic
atgttgtgcatggtcactgg

SEQ ID NO: 1638 - DNA, 20 bp, Artificial Sequence
  Synthetic
tgttccaaaagtctgagttg

SEQ ID NO: 1639 - DNA, 20 bp, Artificial Sequence
  Synthetic
ccatgagggaaccaggtgag

SEQ ID NO: 1640 - DNA, 20 bp, Artificial Sequence
  Synthetic
cacgtgaatgaagcatacga

SEQ ID NO: 1641 - DNA, 20 bp, Artificial Sequence
  Synthetic
gcaacaagttgggtggctgg

SEQ ID NO: 1642 - DNA, 20 bp, Artificial Sequence
  Synthetic
ccaagcctctccggccccgt

SEQ ID NO: 1643 - DNA, 20 bp, Artificial Sequence
  Synthetic
cctgatctcagaggtgaaat

SEQ ID NO: 1644 - DNA, 20 bp, Artificial Sequence
  Synthetic
gtcttagtcccactggaaga

SEQ ID NO: 1645 - DNA, 20 bp, Artificial Sequence
  Synthetic
cctcagggaccagcaggacc

SEQ ID NO: 1646 - DNA, 20 bp, Artificial Sequence
  Synthetic
ttcagtctcgtgtatcttct

SEQ ID NO: 1647 - DNA, 20 bp, Artificial Sequence
  Synthetic
actatgtgcagtggaagact

SEQ ID NO: 1648 - DNA, 20 bp, Artificial Sequence
  Synthetic
gccagccctacttgttctcg

SEQ ID NO: 1649 - DNA, 20 bp, Artificial Sequence
  Synthetic
gtgagttctgctgcatcacc

SEQ ID NO: 1650 - DNA, 20 bp, Artificial Sequence
  Synthetic
atcacaagccccaatggctg

SEQ ID NO: 1651 - DNA, 20 bp, Artificial Sequence
  Synthetic
tcccctccatgtctgggtac

SEQ ID NO: 1652 - DNA, 20 bp, Artificial Sequence
  Synthetic
tctgcaggatgccgttgtcc

SEQ ID NO: 1653 - DNA, 20 bp, Artificial Sequence
  Synthetic
gatgacagaggagctgaaga

SEQ ID NO: 1654 - DNA, 20 bp, Artificial Sequence
  Synthetic
ccagatggtggatgtggaac

SEQ ID NO: 1655 - DNA, 20 bp, Artificial Sequence
  Synthetic
ccatgcctagtaccaggcta

SEQ ID NO: 1656 - DNA, 20 bp, Artificial Sequence
  Synthetic
gtggtgaatggacatgatga

SEQ ID NO: 1657 - DNA, 20 bp, Artificial Sequence
  Synthetic
gctgaaagtcgtggtgatgg

SEQ ID NO: 1658 - DNA, 20 bp, Artificial Sequence
  Synthetic
gcagctatgtccacacctgg

SEQ ID NO: 1659 - DNA, 20 bp, Artificial Sequence
  Synthetic
gtagcggcagtggaactcac

SEQ ID NO: 1660 - DNA, 20 bp, Artificial Sequence
  Synthetic
cctagtcctgcagtcaaaag

SEQ ID NO: 1661 - DNA, 20 bp, Artificial Sequence
  Synthetic
tcatcatggcgggccttcga

SEQ ID NO: 1662 - DNA, 20 bp, Artificial Sequence
  Synthetic
gagtatggggtatgccgttg

SEQ ID NO: 1663 - DNA, 20 bp, Artificial Sequence
  Synthetic
agggttatcccttggcatag

SEQ ID NO: 1664 - DNA, 20 bp, Artificial Sequence
  Synthetic
gctagttcaacttctccatg

SEQ ID NO: 1665 - DNA, 20 bp, Artificial Sequence
  Synthetic
ccctagatcccctggtgcta

SEQ ID NO: 1666 - DNA, 20 bp, Artificial Sequence
  Synthetic
acagcatccggccatggccc

SEQ ID NO: 1667 - DNA, 20 bp, Artificial Sequence
  Synthetic
agcagcagcctttgcccccg

SEQ ID NO: 1668 - DNA, 20 bp, Artificial Sequence
  Synthetic
cctgatttacctggcactcc

SEQ ID NO: 1669 - DNA, 20 bp, Artificial Sequence
  Synthetic
acgcgatcatcccttctttc

SEQ ID NO: 1670 - DNA, 20 bp, Artificial Sequence
  Synthetic
ccaggcagatatctgtcaga

SEQ ID NO: 1671 - DNA, 20 bp, Artificial Sequence
  Synthetic
cccctaggggccgggagcac

SEQ ID NO: 1672 - DNA, 20 bp, Artificial Sequence
  Synthetic
gggccaccaggtcccgaggg

SEQ ID NO: 1673 - DNA, 20 bp, Artificial Sequence
  Synthetic
ggggctagggttggacaagc

SEQ ID NO: 1674 - DNA, 20 bp, Artificial Sequence
  Synthetic
gcgctaccgtaacggcacat

SEQ ID NO: 1675 - DNA, 20 bp, Artificial Sequence
  Synthetic
gtggcaatcatttccctaaa

SEQ ID NO: 1676 - DNA, 20 bp, Artificial Sequence
  Synthetic
tgctgtcacttccttcgaga

SEQ ID NO: 1677 - DNA, 20 bp, Artificial Sequence
  Synthetic
cctgagccatctggtccccg

SEQ ID NO: 1678 - DNA, 20 bp, Artificial Sequence
  Synthetic
aaagcaggccctccgctggc

SEQ ID NO: 1679 - DNA, 20 bp, Artificial Sequence
  Synthetic
cccttaggccccaggccgag

SEQ ID NO: 1680 - DNA, 20 bp, Artificial Sequence
  Synthetic
caggctacccttggaggtcg

SEQ ID NO: 1681 - DNA, 20 bp, Artificial Sequence
  Synthetic
ctgctaccacagcttctcct

SEQ ID NO: 1682 - DNA, 20 bp, Artificial Sequence
  Synthetic
ccagggacgccctggctacc

SEQ ID NO: 1683 - DNA, 20 bp, Artificial Sequence
  Synthetic
agcatccattattgcagatc

SEQ ID NO: 1684 - DNA, 20 bp, Artificial Sequence
  Synthetic
aactgatccttatacctgtt

SEQ ID NO: 1685 - DNA, 20 bp, Artificial Sequence
  Synthetic
tggctagcagtgcagggaca

SEQ ID NO: 1686 - DNA, 20 bp, Artificial Sequence
  Synthetic
tgtcactgggcaaagtggtc

SEQ ID NO: 1687 - DNA, 20 bp, Artificial Sequence
  Synthetic
cgtggagaaagaggtaggcc

SEQ ID NO: 1688 - DNA, 20 bp, Artificial Sequence
  Synthetic
aagcagctccaggctttcca

SEQ ID NO: 1689 - DNA, 20 bp, Artificial Sequence
  Synthetic
caactagaactcccgtaatt

SEQ ID NO: 1690 - DNA, 20 bp, Artificial Sequence
  Synthetic
aatgacttacctgggaaccc

SEQ ID NO: 1691 - DNA, 20 bp, Artificial Sequence
  Synthetic
gctgagccctggcgctgctt

SEQ ID NO: 1692 - DNA, 20 bp, Artificial Sequence
  Synthetic
agtggagcagcagcaagcgt

SEQ ID NO: 1693 - DNA, 20 bp, Artificial Sequence
  Synthetic
cttatgggtctggcaggctg

SEQ ID NO: 1694 - DNA, 20 bp, Artificial Sequence
  Synthetic
ctcctagctggagctgcacc

SEQ ID NO: 1695 - DNA, 20 bp, Artificial Sequence
  Synthetic
ccagcttcaccaggtctcga

SEQ ID NO: 1696 - DNA, 20 bp, Artificial Sequence
  Synthetic
ctgaccgggaggccgcgctg

SEQ ID NO: 1697 - DNA, 20 bp, Artificial Sequence
  Synthetic
cactggccataagattattg

SEQ ID NO: 1698 - DNA, 20 bp, Artificial Sequence
  Synthetic
ccattagtaggctcggcgct

SEQ ID NO: 1699 - DNA, 20 bp, Artificial Sequence
  Synthetic
tttgttcccagagctctacc

SEQ ID NO: 1700 - DNA, 20 bp, Artificial Sequence
  Synthetic
acagcgaccagctggggcag

SEQ ID NO: 1701 - DNA, 20 bp, Artificial Sequence
  Synthetic
ccgccgctagtagtacccgc

SEQ ID NO: 1702 - DNA, 20 bp, Artificial Sequence
  Synthetic
atgagtgtccggagcagctg

SEQ ID NO: 1703 - DNA, 20 bp, Artificial Sequence
  Synthetic
gcaggatcaggttcactcct

SEQ ID NO: 1704 - DNA, 20 bp, Artificial Sequence
  Synthetic
ggccgtggacgagttcgacg

SEQ ID NO: 1705 - DNA, 20 bp, Artificial Sequence
  Synthetic
tagcagccggtgaagtgggc

SEQ ID NO: 1706 - DNA, 20 bp, Artificial Sequence
  Synthetic
cggcctatgtagttgaagct

SEQ ID NO: 1707 - DNA, 20 bp, Artificial Sequence
  Synthetic
ccacatgtcctgtaagtact

SEQ ID NO: 1708 - DNA, 20 bp, Artificial Sequence
  Synthetic
cggacgcccggctgctcctg

SEQ ID NO: 1709 - DNA, 20 bp, Artificial Sequence
  Synthetic
ggtaggttatggtcttcaaa

SEQ ID NO: 1710 - DNA, 20 bp, Artificial Sequence
  Synthetic
aaggccacctggggtaaggt

SEQ ID NO: 1711 - DNA, 20 bp, Artificial Sequence
  Synthetic
gttagccgaactggagaagt

SEQ ID NO: 1712 - DNA, 20 bp, Artificial Sequence
  Synthetic
cttagctggggctgcgggag

SEQ ID NO: 1713 - DNA, 20 bp, Artificial Sequence
  Synthetic
ggccctcattcaccctgggt

SEQ ID NO: 1714 - DNA, 20 bp, Artificial Sequence
  Synthetic
gttctagatgtccacccgct

SEQ ID NO: 1715 - DNA, 20 bp, Artificial Sequence
  Synthetic
gccccagcctaagcagcgcg

SEQ ID NO: 1716 - DNA, 20 bp, Artificial Sequence
  Synthetic
gcccaggttggaagaagctg

SEQ ID NO: 1717 - DNA, 20 bp, Artificial Sequence
  Synthetic
gagctatcgcacatccagat

SEQ ID NO: 1718 - DNA, 20 bp, Artificial Sequence
  Synthetic
cgtagagaacagggcctccc

SEQ ID NO: 1719 - DNA, 20 bp, Artificial Sequence
  Synthetic
tggctatcagttgcaaaaaa

SEQ ID NO: 1720 - DNA, 20 bp, Artificial Sequence
  Synthetic
atccccatggggaaagaggt

SEQ ID NO: 1721 - DNA, 20 bp, Artificial Sequence
  Synthetic
gtgtcagcccttggtgtcca

SEQ ID NO: 1722 - DNA, 20 bp, Artificial Sequence
  Synthetic
agagatgaaattggtaaccc

SEQ ID NO: 1723 - DNA, 20 bp, Artificial Sequence
  Synthetic
cagacaggcaggcccatcag

SEQ ID NO: 1724 - DNA, 20 bp, Artificial Sequence
  Synthetic
cctagcgcagctggtaccag

SEQ ID NO: 1725 - DNA, 20 bp, Artificial Sequence
  Synthetic
gcctcaactcagctgctcaa

SEQ ID NO: 1726 - DNA, 20 bp, Artificial Sequence
  Synthetic
ccatgactggacggtaaggg

SEQ ID NO: 1727 - DNA, 20 bp, Artificial Sequence
  Synthetic
gggtttacaggcgtgtttta

SEQ ID NO: 1728 - DNA, 20 bp, Artificial Sequence
  Synthetic
catcatgcctccatcatttc

SEQ ID NO: 1729 - DNA, 20 bp, Artificial Sequence
  Synthetic
ccggcttccaccgcttccgc

SEQ ID NO: 1730 - DNA, 20 bp, Artificial Sequence
  Synthetic
ccgtcatgctgttgctgagc

SEQ ID NO: 1731 - DNA, 20 bp, Artificial Sequence
  Synthetic
ctccatgtcccaggtcacgc

SEQ ID NO: 1732 - DNA, 20 bp, Artificial Sequence
  Synthetic
ttggcctactcaaagttacc

SEQ ID NO: 1733 - DNA, 20 bp, Artificial Sequence
  Synthetic
cctagtggtaaaggagaaag

SEQ ID NO: 1734 - DNA, 20 bp, Artificial Sequence
  Synthetic
ctgctactcggcgatgcgct

SEQ ID NO: 1735 - DNA, 20 bp, Artificial Sequence
  Synthetic
cctcaacgccgttcgggcac

SEQ ID NO: 1736 - DNA, 20 bp, Artificial Sequence
  Synthetic
ccgagaccccacacacctgc

SEQ ID NO: 1737 - DNA, 20 bp, Artificial Sequence
  Synthetic
atcatcccataagccccact

SEQ ID NO: 1738 - DNA, 20 bp, Artificial Sequence
  Synthetic
cagtattttcatggatagga

SEQ ID NO: 1739 - DNA, 20 bp, Artificial Sequence
  Synthetic
tcaggccaccctcatctgcc

SEQ ID NO: 1740 - DNA, 20 bp, Artificial Sequence
  Synthetic
cagggcctaggagaagtccc

SEQ ID NO: 1741 - DNA, 20 bp, Artificial Sequence
  Synthetic
ctcgggggacggggacagcg

SEQ ID NO: 1742 - DNA, 20 bp, Artificial Sequence
  Synthetic
tctctagggaacaagactca

SEQ ID NO: 1743 - DNA, 20 bp, Artificial Sequence
  Synthetic
ggggcaatcatctccctcct

SEQ ID NO: 1744 - DNA, 20 bp, Artificial Sequence
  Synthetic
ccactagatgcgctctttga

SEQ ID NO: 1745 - DNA, 20 bp, Artificial Sequence
  Synthetic
gatgaatggctgcaggctgg

SEQ ID NO: 1746 - DNA, 20 bp, Artificial Sequence
  Synthetic
gtcgatccagctggaaagag

SEQ ID NO: 1747 - DNA, 20 bp, Artificial Sequence
  Synthetic
ggggatgagtgtgttgttga

SEQ ID NO: 1748 - DNA, 20 bp, Artificial Sequence
  Synthetic
gttagaagagtgcttggact

SEQ ID NO: 1749 - DNA, 20 bp, Artificial Sequence
  Synthetic
atggtacggaggccctggag

SEQ ID NO: 1750 - DNA, 20 bp, Artificial Sequence
  Synthetic
cgcgtctaggatgcttacac

SEQ ID NO: 1751 - DNA, 20 bp, Artificial Sequence
  Synthetic
cagccactcactgtttctat

SEQ ID NO: 1752 - DNA, 20 bp, Artificial Sequence
  Synthetic
cccaatgggcggtttgtcat

SEQ ID NO: 1753 - DNA, 20 bp, Artificial Sequence
  Synthetic
cctcaggcaccagggaagcc

SEQ ID NO: 1754 - DNA, 20 bp, Artificial Sequence
  Synthetic
cccctggctacgggggaatg

SEQ ID NO: 1755 - DNA, 20 bp, Artificial Sequence
  Synthetic
gcaatatgtgtggccacttg

SEQ ID NO: 1756 - DNA, 20 bp, Artificial Sequence
  Synthetic
acctcactctccagccttgc

SEQ ID NO: 1757 - DNA, 20 bp, Artificial Sequence
  Synthetic
actgactggggagaaaccca

SEQ ID NO: 1758 - DNA, 20 bp, Artificial Sequence
  Synthetic
aagtgactggccaacttctg

SEQ ID NO: 1759 - DNA, 20 bp, Artificial Sequence
  Synthetic
gtttaggggtaagtccggca

SEQ ID NO: 1760 - DNA, 20 bp, Artificial Sequence
  Synthetic
tccacttgaagaagccgacc

SEQ ID NO: 1761 - DNA, 20 bp, Artificial Sequence
  Synthetic
ttctcacttttcgacaggag

SEQ ID NO: 1762 - DNA, 20 bp, Artificial Sequence
  Synthetic
caggcaggcagccaggatca

SEQ ID NO: 1763 - DNA, 20 bp, Artificial Sequence
  Synthetic
agccctacgaggaggattcg

SEQ ID NO: 1764 - DNA, 20 bp, Artificial Sequence
  Synthetic
gctacctctggtaccagtca

SEQ ID NO: 1765 - DNA, 20 bp, Artificial Sequence
  Synthetic
agcaagggtcccctacccac

SEQ ID NO: 1766 - DNA, 20 bp, Artificial Sequence
  Synthetic
tcatagctatcactatggag

SEQ ID NO: 1767 - DNA, 20 bp, Artificial Sequence
  Synthetic
gcgtagagccgcgataaccc

SEQ ID NO: 1768 - DNA, 20 bp, Artificial Sequence
  Synthetic
ccatcgtgctgttgctgagc

SEQ ID NO: 1769 - DNA, 20 bp, Artificial Sequence
  Synthetic
tctggaactgctgatggctc

SEQ ID NO: 1770 - DNA, 20 bp, Artificial Sequence
  Synthetic
attttaaggttcaacccctt

SEQ ID NO: 1771 - DNA, 20 bp, Artificial Sequence
  Synthetic
accaccatgtctgacacctt

SEQ ID NO: 1772 - DNA, 20 bp, Artificial Sequence
  Synthetic
cactcagattctgtgtccaa

SEQ ID NO: 1773 - DNA, 20 bp, Artificial Sequence
  Synthetic
aatgacccacaacactgagc

SEQ ID NO: 1774 - DNA, 20 bp, Artificial Sequence
  Synthetic
ttctgcacatggcggtcact

SEQ ID NO: 1775 - DNA, 20 bp, Artificial Sequence
  Synthetic
ctactaccagtgcaagctgg

SEQ ID NO: 1776 - DNA, 20 bp, Artificial Sequence
  Synthetic
gtaacgacagacttctcctc

SEQ ID NO: 1777 - DNA, 20 bp, Artificial Sequence
  Synthetic
tcgcagaaaacggtgcgcac

SEQ ID NO: 1778 - DNA, 20 bp, Artificial Sequence
  Synthetic
cgagaacggccaggacttcc

SEQ ID NO: 1779 - DNA, 20 bp, Artificial Sequence
  Synthetic
gtatgctagctttgcgagtt

SEQ ID NO: 1780 - DNA, 20 bp, Artificial Sequence
  Synthetic
cccaggccttccggccttgc

SEQ ID NO: 1781 - DNA, 20 bp, Artificial Sequence
  Synthetic
cggtgcagaagagggactgg

SEQ ID NO: 1782 - DNA, 20 bp, Artificial Sequence
  Synthetic
caggagcagcacctggaagc

SEQ ID NO: 1783 - DNA, 20 bp, Artificial Sequence
  Synthetic
tcattgatggtgatgtcctc

SEQ ID NO: 1784 - DNA, 20 bp, Artificial Sequence
  Synthetic
acaagacattcgtggcgata

SEQ ID NO: 1785 - DNA, 20 bp, Artificial Sequence
  Synthetic
aaagcactacactgaagacc

SEQ ID NO: 1786 - DNA, 20 bp, Artificial Sequence
  Synthetic
ggccggcaacgtctttagct

SEQ ID NO: 1787 - DNA, 20 bp, Artificial Sequence
  Synthetic
caactaaaagagtgccagcc

SEQ ID NO: 1788 - DNA, 20 bp, Artificial Sequence
  Synthetic
cgcagggcatcaactgggag

SEQ ID NO: 1789 - DNA, 20 bp, Artificial Sequence
  Synthetic
aatctcacacacgaaattgt

SEQ ID NO: 1790 - DNA, 20 bp, Artificial Sequence
  Synthetic
cggttacagtcactgatagt

SEQ ID NO: 1791 - DNA, 20 bp, Artificial Sequence
  Synthetic
gaactagtagatgccgttca

SEQ ID NO: 1792 - DNA, 20 bp, Artificial Sequence
  Synthetic
accaccaccgtggacgtcgt

SEQ ID NO: 1793 - DNA, 20 bp, Artificial Sequence
  Synthetic
ggccaggctgctggggctgc

SEQ ID NO: 1794 - DNA, 20 bp, Artificial Sequence
  Synthetic
aggtccagcacatcttctcc

SEQ ID NO: 1795 - DNA, 20 bp, Artificial Sequence
  Synthetic
cctgaatggccaggcctgaa

SEQ ID NO: 1796 - DNA, 20 bp, Artificial Sequence
  Synthetic
aggctgatacttctacattc

SEQ ID NO: 1797 - DNA, 20 bp, Artificial Sequence
  Synthetic
cctaggaacgatggtccccc

SEQ ID NO: 1798 - DNA, 20 bp, Artificial Sequence
  Synthetic
aacgatgctcctggtgaagc

SEQ ID NO: 1799 - DNA, 20 bp, Artificial Sequence
  Synthetic
gaatgacatcaacctggcac

SEQ ID NO: 1800 - DNA, 20 bp, Artificial Sequence
  Synthetic
acagatgaacgtggagctgc

SEQ ID NO: 1801 - DNA, 20 bp, Artificial Sequence
  Synthetic
aggcaatgtacataaatctg

SEQ ID NO: 1802 - DNA, 20 bp, Artificial Sequence
  Synthetic
atggaggtaaaagggactat

SEQ ID NO: 1803 - DNA, 20 bp, Artificial Sequence
  Synthetic
cttattcgatgaagctggcc

SEQ ID NO: 1804 - DNA, 20 bp, Artificial Sequence
  Synthetic
tgcagccgcagatcccgatc

SEQ ID NO: 1805 - DNA, 20 bp, Artificial Sequence
  Synthetic
tctctctaaaatcactgagc

SEQ ID NO: 1806 - DNA, 20 bp, Artificial Sequence
  Synthetic
ggactacaatagattcccgc

SEQ ID NO: 1807 - DNA, 20 bp, Artificial Sequence
  Synthetic
tcccaaatctccctagaacg

SEQ ID NO: 1808 - DNA, 20 bp, Artificial Sequence
  Synthetic
tgaggctgcggcagcccgcc

SEQ ID NO: 1809 - DNA, 20 bp, Artificial Sequence
  Synthetic
tacttcaacacagtgccaca

SEQ ID NO: 1810 - DNA, 20 bp, Artificial Sequence
  Synthetic
cccagaagtccaggaggacc

SEQ ID NO: 1811 - DNA, 20 bp, Artificial Sequence
  Synthetic
tgtcaccctgactgcgggcc

SEQ ID NO: 1812 - DNA, 20 bp, Artificial Sequence
  Synthetic
cctgatcatccaggcccacc

SEQ ID NO: 1813 - DNA, 20 bp, Artificial Sequence
  Synthetic
tcactgacagacagtggccc

SEQ ID NO: 1814 - DNA, 20 bp, Artificial Sequence
  Synthetic
gcgagcagcacgagtttgcg

SEQ ID NO: 1815 - DNA, 20 bp, Artificial Sequence
  Synthetic
ttcctacttggagtgatttc

SEQ ID NO: 1816 - DNA, 20 bp, Artificial Sequence
  Synthetic
ccagtgaaagcactattgac

SEQ ID NO: 1817 - DNA, 20 bp, Artificial Sequence
  Synthetic
ctagccaacattgttttgtg

SEQ ID NO: 1818 - DNA, 20 bp, Artificial Sequence
  Synthetic
tggctcaaaccagaggcttc

SEQ ID NO: 1819 - DNA, 20 bp, Artificial Sequence
  Synthetic
gaacaatctacaagggaaag

SEQ ID NO: 1820 - DNA, 20 bp, Artificial Sequence
  Synthetic
gacagagggagtactcggcg

SEQ ID NO: 1821 - DNA, 20 bp, Artificial Sequence
  Synthetic
tccggagcagcatccacaca

SEQ ID NO: 1822 - DNA, 20 bp, Artificial Sequence
  Synthetic
gaagaggcagctggttccac

SEQ ID NO: 1823 - DNA, 20 bp, Artificial Sequence
  Synthetic
ggactacagagtagtccggc

SEQ ID NO: 1824 - DNA, 20 bp, Artificial Sequence
  Synthetic
cccactcctggatcaaataa

SEQ ID NO: 1825 - DNA, 20 bp, Artificial Sequence
  Synthetic
aaggacgacagaggtttgcc

SEQ ID NO: 1826 - DNA, 20 bp, Artificial Sequence
  Synthetic
tggcctgacacgttctcatg

SEQ ID NO: 1827 - DNA, 20 bp, Artificial Sequence
  Synthetic
tgcttaagagaggtagaagg

SEQ ID NO: 1828 - DNA, 20 bp, Artificial Sequence
  Synthetic
gtttcaataagcccgacgga

SEQ ID NO: 1829 - DNA, 20 bp, Artificial Sequence
  Synthetic
caaaggacacagagccaaat

SEQ ID NO: 1830 - DNA, 20 bp, Artificial Sequence
  Synthetic
tgctcccaggcatacacatc

SEQ ID NO: 1831 - DNA, 20 bp, Artificial Sequence
  Synthetic
tgactgatgtaaatacaatg

SEQ ID NO: 1832 - DNA, 20 bp, Artificial Sequence
  Synthetic
tgaccttatatgttggtgtg

SEQ ID NO: 1833 - DNA, 20 bp, Artificial Sequence
  Synthetic
ctcagctgaccgatcgcttc

SEQ ID NO: 1834 - DNA, 20 bp, Artificial Sequence
  Synthetic
gctgaaccaaatggcatccc

SEQ ID NO: 1835 - DNA, 20 bp, Artificial Sequence
  Synthetic
tggtatccctttggatttga

SEQ ID NO: 1836 - DNA, 20 bp, Artificial Sequence
  Synthetic
gcatccactatcccagtaag

SEQ ID NO: 1837 - DNA, 20 bp, Artificial Sequence
  Synthetic
caaaccacccactgggctgc

SEQ ID NO: 1838 - DNA, 20 bp, Artificial Sequence
  Synthetic
ggtccccagggcctcaaggt

SEQ ID NO: 1839 - DNA, 20 bp, Artificial Sequence
  Synthetic
cgcaggctgaagggcgaccg

SEQ ID NO: 1840 - DNA, 20 bp, Artificial Sequence
  Synthetic
agccaagtcagcgctgctcg

SEQ ID NO: 1841 - DNA, 20 bp, Artificial Sequence
  Synthetic
ttagtaatacttgtgggcca

SEQ ID NO: 1842 - DNA, 20 bp, Artificial Sequence
  Synthetic
cctgatgaacctgggcaagc

SEQ ID NO: 1843 - DNA, 20 bp, Artificial Sequence
  Synthetic
cacggacgtggcggccgccg

SEQ ID NO: 1844 - DNA, 20 bp, Artificial Sequence
  Synthetic
agaactactccacagggttc

SEQ ID NO: 1845 - DNA, 20 bp, Artificial Sequence
  Synthetic
gtccaaggcttgcagctgcc

SEQ ID NO: 1846 - DNA, 20 bp, Artificial Sequence
  Synthetic
aataatgccagagcattaga

SEQ ID NO: 1847 - DNA, 20 bp, Artificial Sequence
  Synthetic
ccagaggtgaagggtcaaag

SEQ ID NO: 1848 - DNA, 20 bp, Artificial Sequence
  Synthetic
tactggagaacggcaaccac

SEQ ID NO: 1849 - DNA, 20 bp, Artificial Sequence
  Synthetic
ggacaccattcagcggactg

SEQ ID NO: 1850 - DNA, 20 bp, Artificial Sequence
  Synthetic
acctagtgtggttggtgctg

SEQ ID NO: 1851 - DNA, 20 bp, Artificial Sequence
  Synthetic
aggcccaagatgagcacaca

SEQ ID NO: 1852 - DNA, 20 bp, Artificial Sequence
  Synthetic
ggttctagcacatggagatg

SEQ ID NO: 1853 - DNA, 20 bp, Artificial Sequence
  Synthetic
ggtggcatggctcgggcctg

SEQ ID NO: 1854 - DNA, 20 bp, Artificial Sequence
  Synthetic
aaccagatggacagccacac

SEQ ID NO: 1855 - DNA, 20 bp, Artificial Sequence
  Synthetic
ccatctcaacctggggctcc

SEQ ID NO: 1856 - DNA, 20 bp, Artificial Sequence
  Synthetic
tggtctgctagatggacagc

SEQ ID NO: 1857 - DNA, 20 bp, Artificial Sequence
  Synthetic
tgcgtcagattctttctaga

SEQ ID NO: 1858 - DNA, 20 bp, Artificial Sequence
  Synthetic
tagttctcactcagtggaca

SEQ ID NO: 1859 - DNA, 20 bp, Artificial Sequence
  Synthetic
tctcaacagcctgtgggaga

SEQ ID NO: 1860 - DNA, 20 bp, Artificial Sequence
  Synthetic
agcagcaacgattgttggtg

SEQ ID NO: 1861 - DNA, 20 bp, Artificial Sequence
  Synthetic
ttcttattgagggctatgcc

SEQ ID NO: 1862 - DNA, 20 bp, Artificial Sequence
  Synthetic
agggccaacacagtggaggg

SEQ ID NO: 1863 - DNA, 20 bp, Artificial Sequence
  Synthetic
cccagggacctcggacctgt

SEQ ID NO: 1864 - DNA, 20 bp, Artificial Sequence
  Synthetic
accaaccaccactttctgat

SEQ ID NO: 1865 - DNA, 20 bp, Artificial Sequence
  Synthetic
aaggggcaggtgacaggctg

SEQ ID NO: 1866 - DNA, 20 bp, Artificial Sequence
  Synthetic
ccccaagttcctgagatacc

SEQ ID NO: 1867 - DNA, 20 bp, Artificial Sequence
  Synthetic
gaaagtggaatcacactgag

SEQ ID NO: 1868 - DNA, 20 bp, Artificial Sequence
  Synthetic
cctgaaattccaggacctcc

SEQ ID NO: 1869 - DNA, 20 bp, Artificial Sequence
  Synthetic
gcctaagtccagggttcagg

SEQ ID NO: 1870 - DNA, 20 bp, Artificial Sequence
  Synthetic
gcaaaggtaccagcttagac

SEQ ID NO: 1871 - DNA, 20 bp, Artificial Sequence
  Synthetic
gccgatcctactggtcctat

SEQ ID NO: 1872 - DNA, 20 bp, Artificial Sequence
  Synthetic
ctcaagtatggctatgatgc

SEQ ID NO: 1873 - DNA, 20 bp, Artificial Sequence
  Synthetic
gacgcacatcaatgccaccc

SEQ ID NO: 1874 - DNA, 20 bp, Artificial Sequence
  Synthetic
gagggagaacgggccacagc

SEQ ID NO: 1875 - DNA, 20 bp, Artificial Sequence
  Synthetic
agagatgaccaaggacgtga

SEQ ID NO: 1876 - DNA, 20 bp, Artificial Sequence
  Synthetic
gccagtgctactggtgccag

SEQ ID NO: 1877 - DNA, 20 bp, Artificial Sequence
  Synthetic
gctgatcgccctggggagcc

SEQ ID NO: 1878 - DNA, 20 bp, Artificial Sequence
  Synthetic
tcaggcagccttgggctgct

SEQ ID NO: 1879 - DNA, 20 bp, Artificial Sequence
  Synthetic
gtactagaagatgcagtccc

SEQ ID NO: 1880 - DNA, 20 bp, Artificial Sequence
  Synthetic
agcgttatatattctctgtg

SEQ ID NO: 1881 - DNA, 20 bp, Artificial Sequence
  Synthetic
aaagatgaaagaggatttcc

SEQ ID NO: 1882 - DNA, 20 bp, Artificial Sequence
  Synthetic
aagtccgagcaacggggccg

SEQ ID NO: 1883 - DNA, 20 bp, Artificial Sequence
  Synthetic
ggactatgaccagcatagaa

SEQ ID NO: 1884 - DNA, 20 bp, Artificial Sequence
  Synthetic
gggccacttgttggctggct

SEQ ID NO: 1885 - DNA, 20 bp, Artificial Sequence
  Synthetic
ggcccaagagagtcttgccc

SEQ ID NO: 1886 - DNA, 20 bp, Artificial Sequence
  Synthetic
acgtgaaacatctcgttcgc

SEQ ID NO: 1887 - DNA, 20 bp, Artificial Sequence
  Synthetic
agtcacagatcttcacttcc

SEQ ID NO: 1888 - DNA, 20 bp, Artificial Sequence
  Synthetic
agtcagagatgttcttgcac

SEQ ID NO: 1889 - DNA, 20 bp, Artificial Sequence
  Synthetic
accaagtgttgctggtgctg

SEQ ID NO: 1890 - DNA, 20 bp, Artificial Sequence
  Synthetic
aagagtgaaacaggtgctcc

SEQ ID NO: 1891 - DNA, 20 bp, Artificial Sequence
  Synthetic
ctggaggggcgggaggcccc

SEQ ID NO: 1892 - DNA, 20 bp, Artificial Sequence
  Synthetic
aagagaagaacctggacctc

SEQ ID NO: 1893 - DNA, 20 bp, Artificial Sequence
  Synthetic
cctagagagaaaggtgtgcc

SEQ ID NO: 1894 - DNA, 20 bp, Artificial Sequence
  Synthetic
ttgcaaacaacatgttggga

SEQ ID NO: 1895 - DNA, 20 bp, Artificial Sequence
  Synthetic
ggtggcaagaagcagagaat

SEQ ID NO: 1896 - DNA, 20 bp, Artificial Sequence
  Synthetic
tgtgctccatggtgatggcc

SEQ ID NO: 1897 - DNA, 20 bp, Artificial Sequence
  Synthetic
atgtcgcagggggcggcccc

SEQ ID NO: 1898 - DNA, 20 bp, Artificial Sequence
  Synthetic
agacagagcagccgtcgtgc

SEQ ID NO: 1899 - DNA, 20 bp, Artificial Sequence
  Synthetic
aaggaagacatcggagtccc

SEQ ID NO: 1900 - DNA, 20 bp, Artificial Sequence
  Synthetic
aagaggcccagaggtcttcc

SEQ ID NO: 1901 - DNA, 20 bp, Artificial Sequence
  Synthetic
cccagacgacctggagagcg

SEQ ID NO: 1902 - DNA, 20 bp, Artificial Sequence
  Synthetic
cgctactcgcagaggccgcc

SEQ ID NO: 1903 - DNA, 20 bp, Artificial Sequence
  Synthetic
cccagtgaaaaggggcccag

SEQ ID NO: 1904 - DNA, 20 bp, Artificial Sequence
  Synthetic
ataggcaacctgcactggtg

SEQ ID NO: 1905 - DNA, 20 bp, Artificial Sequence
  Synthetic
tttttaggttcacgctgctg

SEQ ID NO: 1906 - DNA, 20 bp, Artificial Sequence
  Synthetic
gctactggtagagctggtca

SEQ ID NO: 1907 - DNA, 20 bp, Artificial Sequence
  Synthetic
cgtgcaagacaggaagaggc

SEQ ID NO: 1908 - DNA, 20 bp, Artificial Sequence
  Synthetic
cccggaagcccacagcacca

SEQ ID NO: 1909 - DNA, 20 bp, Artificial Sequence
  Synthetic
agtcagccccaagggcccca

SEQ ID NO: 1910 - DNA, 20 bp, Artificial Sequence
  Synthetic
cgcagcaaccatggtggcat

SEQ ID NO: 1911 - DNA, 20 bp, Artificial Sequence
  Synthetic
tctgctaggagaagtagagg

SEQ ID NO: 1912 - DNA, 20 bp, Artificial Sequence
  Synthetic
gttattggtattcagtattc

SEQ ID NO: 1913 - DNA, 20 bp, Artificial Sequence
  Synthetic
cttcaaagagcaaggttgcc

SEQ ID NO: 1914 - DNA, 20 bp, Artificial Sequence
  Synthetic
gctcagatgatggtgtctgc

SEQ ID NO: 1915 - DNA, 20 bp, Artificial Sequence
  Synthetic
ccgccacctggcggttggcg

SEQ ID NO: 1916 - DNA, 20 bp, Artificial Sequence
  Synthetic
caagcccaacaggcagagcc

SEQ ID NO: 1917 - DNA, 20 bp, Artificial Sequence
  Synthetic
ccagaagctaacggtctcag

SEQ ID NO: 1918 - DNA, 20 bp, Artificial Sequence
  Synthetic
gcagggcgaccatggctctc

SEQ ID NO: 1919 - DNA, 20 bp, Artificial Sequence
  Synthetic
tgggagccatgaggtggggc

SEQ ID NO: 1920 - DNA, 20 bp, Artificial Sequence
  Synthetic
cccccatgatggggacgact

SEQ ID NO: 1921 - DNA, 20 bp, Artificial Sequence
  Synthetic
gttgaacccagtggacctcc

SEQ ID NO: 1922 - DNA, 20 bp, Artificial Sequence
  Synthetic
gatgatcgcactggacatcc

SEQ ID NO: 1923 - DNA, 20 bp, Artificial Sequence
  Synthetic
tcctgaagaccctggcctgc

SEQ ID NO: 1924 - DNA, 20 bp, Artificial Sequence
  Synthetic
gggcggcagctacgtgctct

SEQ ID NO: 1925 - DNA, 20 bp, Artificial Sequence
  Synthetic
actcaagatgactttgtgcg

SEQ ID NO: 1926 - DNA, 20 bp, Artificial Sequence
  Synthetic
atgccaggtggcatgtttcc

SEQ ID NO: 1927 - DNA, 20 bp, Artificial Sequence
  Synthetic
aacagatgctcctggattaa

SEQ ID NO: 1928 - DNA, 20 bp, Artificial Sequence
  Synthetic
gccccagatgtcatcctcct

SEQ ID NO: 1929 - DNA, 20 bp, Artificial Sequence
  Synthetic
cgatgaacgaaatggagaaa

SEQ ID NO: 1930 - DNA, 20 bp, Artificial Sequence
  Synthetic
gaaaagagatgaagggccta

SEQ ID NO: 1931 - DNA, 20 bp, Artificial Sequence
  Synthetic
ctcaccagactacgagaccg

SEQ ID NO: 1932 - DNA, 20 bp, Artificial Sequence
  Synthetic
gaacgacatgaagtactacc

SEQ ID NO: 1933 - DNA, 20 bp, Artificial Sequence
  Synthetic
gccagaaccacctcctccgt

SEQ ID NO: 1934 - DNA, 20 bp, Artificial Sequence
  Synthetic
cctgacccaattggcccagc

SEQ ID NO: 1935 - DNA, 20 bp, Artificial Sequence
  Synthetic
tgccatgactgtggcctgcc

SEQ ID NO: 1936 - DNA, 20 bp, Artificial Sequence
  Synthetic
cgtagcgataagggagagcc

SEQ ID NO: 1937 - DNA, 20 bp, Artificial Sequence
  Synthetic
gttttaacagctctccaccc

SEQ ID NO: 1938 - DNA, 20 bp, Artificial Sequence
  Synthetic
aaagaggacattggccctcc

SEQ ID NO: 1939 - DNA, 20 bp, Artificial Sequence
  Synthetic
accgcagggaggccgccagc

SEQ ID NO: 1940 - DNA, 20 bp, Artificial Sequence
  Synthetic
tcaggaacctcctggaccac

SEQ ID NO: 1941 - DNA, 20 bp, Artificial Sequence
  Synthetic
ccccagaggtgttcacacac

SEQ ID NO: 1942 - DNA, 20 bp, Artificial Sequence
  Synthetic
gtcctagcaggtgcccccgt

SEQ ID NO: 1943 - DNA, 20 bp, Artificial Sequence
  Synthetic
cctctccacggcgcggccat

SEQ ID NO: 1944 - DNA, 20 bp, Artificial Sequence
  Synthetic
tctagagaaatggccagcgg

SEQ ID NO: 1945 - DNA, 20 bp, Artificial Sequence
  Synthetic
agaactatttgtttagttct

SEQ ID NO: 1946 - DNA, 20 bp, Artificial Sequence
  Synthetic
cgctcatttagggaaggaga

SEQ ID NO: 1947 - DNA, 20 bp, Artificial Sequence
  Synthetic
gcggtcagccacctggctgg

SEQ ID NO: 1948 - DNA, 20 bp, Artificial Sequence
  Synthetic
tggttgatttgtcagcaatc

SEQ ID NO: 1949 - DNA, 20 bp, Artificial Sequence
  Synthetic
gacgaccagaatggcgtgcc

SEQ ID NO: 1950 - DNA, 20 bp, Artificial Sequence
  Synthetic
aactaagcgaatttggataa

SEQ ID NO: 1951 - DNA, 20 bp, Artificial Sequence
  Synthetic
ttcctcgtgatcgcaggctt

SEQ ID NO: 1952 - DNA, 20 bp, Artificial Sequence
  Synthetic
aaagatcatgctggtcttgc

SEQ ID NO: 1953 - DNA, 20 bp, Artificial Sequence
  Synthetic
cctagacaaagaggagaacc

SEQ ID NO: 1954 - DNA, 20 bp, Artificial Sequence
  Synthetic
tccctaacagagcccgggga

SEQ ID NO: 1955 - DNA, 20 bp, Artificial Sequence
  Synthetic
agaaccacagagctaagcaa

SEQ ID NO: 1956 - DNA, 20 bp, Artificial Sequence
  Synthetic
acatcagcaagcctttactt

SEQ ID NO: 1957 - DNA, 20 bp, Artificial Sequence
  Synthetic
ccagaccaaccctgctctgg

SEQ ID NO: 1958 - DNA, 20 bp, Artificial Sequence
  Synthetic
gcaaccagttgtaccgcgag

SEQ ID NO: 1959 - DNA, 20 bp, Artificial Sequence
  Synthetic
taatcacttggccatgtagt

SEQ ID NO: 1960 - DNA, 20 bp, Artificial Sequence
  Synthetic
ctttcacacacagtagtccc

SEQ ID NO: 1961 - DNA, 20 bp, Artificial Sequence
  Synthetic
cgtccaggtagtgcgtcttc

SEQ ID NO: 1962 - DNA, 20 bp, Artificial Sequence
  Synthetic
tctcatcctcgggggccaac

SEQ ID NO: 1963 - DNA, 20 bp, Artificial Sequence
  Synthetic
cctcaagggcctgtctgacc

SEQ ID NO: 1964 - DNA, 20 bp, Artificial Sequence
  Synthetic
cccaggtttccagggagcaa

SEQ ID NO: 1965 - DNA, 20 bp, Artificial Sequence
  Synthetic
tgcaagcacctgcaagaatg

SEQ ID NO: 1966 - DNA, 20 bp, Artificial Sequence
  Synthetic
ctaggcaggacacatctcac

SEQ ID NO: 1967 - DNA, 20 bp, Artificial Sequence
  Synthetic
cacacagagctcattgtaga

SEQ ID NO: 1968 - DNA, 20 bp, Artificial Sequence
  Synthetic
gtgatgaaaaactctcccgc

SEQ ID NO: 1969 - DNA, 20 bp, Artificial Sequence
  Synthetic
tccccctgcacatgcgggac

SEQ ID NO: 1970 - DNA, 20 bp, Artificial Sequence
  Synthetic
ttcactccaggtagggcaga

SEQ ID NO: 1971 - DNA, 20 bp, Artificial Sequence
  Synthetic
aaggatgaaacaggtgctcc

SEQ ID NO: 1972 - DNA, 20 bp, Artificial Sequence
  Synthetic
aaggtttaataggcagctga

SEQ ID NO: 1973 - DNA, 20 bp, Artificial Sequence
  Synthetic
tctgatcctagtggactccc

SEQ ID NO: 1974 - DNA, 20 bp, Artificial Sequence
  Synthetic
tagagcttgaggttcacatc

SEQ ID NO: 1975 - DNA, 20 bp, Artificial Sequence
  Synthetic
atacatttttaccaagaagt

SEQ ID NO: 1976 - DNA, 20 bp, Artificial Sequence
  Synthetic
ttgggaaggttcttacatga

SEQ ID NO: 1977 - DNA, 20 bp, Artificial Sequence
  Synthetic
tatccactacaacccgctgc

SEQ ID NO: 1978 - DNA, 20 bp, Artificial Sequence
  Synthetic
cccgaccccccagggccgcc

SEQ ID NO: 1979 - DNA, 20 bp, Artificial Sequence
  Synthetic
gcagtgctgagcagagcagc

SEQ ID NO: 1980 - DNA, 20 bp, Artificial Sequence
  Synthetic
cattcttaagtgtgaaggtc

SEQ ID NO: 1981 - DNA, 20 bp, Artificial Sequence
  Synthetic
gtgccggaagacggggctgc

SEQ ID NO: 1982 - DNA, 20 bp, Artificial Sequence
  Synthetic
aaggcagtagtttttagtaa

SEQ ID NO: 1983 - DNA, 20 bp, Artificial Sequence
  Synthetic
tgaagttgtccaggtgagcc

SEQ ID NO: 1984 - DNA, 20 bp, Artificial Sequence
  Synthetic
ccgatgataccagtttcgag

SEQ ID NO: 1985 - DNA, 20 bp, Artificial Sequence
  Synthetic
ttacgtatattcatggagta

SEQ ID NO: 1986 - DNA, 20 bp, Artificial Sequence
  Synthetic
cccaggttgccaggggctcc

SEQ ID NO: 1987 - DNA, 20 bp, Artificial Sequence
  Synthetic
cataggcatcatgtccatcc

SEQ ID NO: 1988 - DNA, 20 bp, Artificial Sequence
  Synthetic
tgaaagagccacatataaag

SEQ ID NO: 1989 - DNA, 20 bp, Artificial Sequence
  Synthetic
ctcttctacaatatgtagct

SEQ ID NO: 1990 - DNA, 20 bp, Artificial Sequence
  Synthetic
attttatgcatctggtggaa

SEQ ID NO: 1991 - DNA, 20 bp, Artificial Sequence
  Synthetic
gcagctgtagtttagtccta

SEQ ID NO: 1992 - DNA, 20 bp, Artificial Sequence
  Synthetic
atgaaatctggccagctttg

SEQ ID NO: 1993 - DNA, 20 bp, Artificial Sequence
  Synthetic
ttgcaagcaaaatagttctg

SEQ ID NO: 1994 - DNA, 20 bp, Artificial Sequence
  Synthetic
ccattatgttgagattgggg

SEQ ID NO: 1995 - DNA, 20 bp, Artificial Sequence
  Synthetic
cagagagagctggggcggat

SEQ ID NO: 1996 - DNA, 20 bp, Artificial Sequence
  Synthetic
gcagaaccccctggaggttc

SEQ ID NO: 1997 - DNA, 20 bp, Artificial Sequence
  Synthetic
gcctagccctcggccatcgc

SEQ ID NO: 1998 - DNA, 20 bp, Artificial Sequence
  Synthetic
tgttgagtaccagggaatga

SEQ ID NO: 1999 - DNA, 20 bp, Artificial Sequence
  Synthetic
gctgcagcgcattgccagcc

SEQ ID NO: 2000 - DNA, 20 bp, Artificial Sequence
  Synthetic
catctcagtagacttttacc

SEQ ID NO: 2001 - DNA, 20 bp, Artificial Sequence
  Synthetic
ggaagctaggagctggggga

SEQ ID NO: 2002 - DNA, 20 bp, Artificial Sequence
  Synthetic
cgacctctacatggtctctc

SEQ ID NO: 2003 - DNA, 20 bp, Artificial Sequence
  Synthetic
ttggccaagtgcctgtgcgg

SEQ ID NO: 2004 - DNA, 20 bp, Artificial Sequence
  Synthetic
tcctagcactccaggtcctc

SEQ ID NO: 2005 - DNA, 20 bp, Artificial Sequence
  Synthetic
gggctagagaaggacctgga

SEQ ID NO: 2006 - DNA, 20 bp, Artificial Sequence
  Synthetic
gttgaacgtgagccgcttct

SEQ ID NO: 2007 - DNA, 20 bp, Artificial Sequence
  Synthetic
gctcagcagggcctgcaatt

SEQ ID NO: 2008 - DNA, 20 bp, Artificial Sequence
  Synthetic
accagaaagcatggggaaca

SEQ ID NO: 2009 - DNA, 20 bp, Artificial Sequence
  Synthetic
acaacagcatgccactggcc

SEQ ID NO: 2010 - DNA, 20 bp, Artificial Sequence
  Synthetic
gtatactgttgatgtgtatg

SEQ ID NO: 2011 - DNA, 20 bp, Artificial Sequence
  Synthetic
ttaatcacagcttttggtcc

SEQ ID NO: 2012 - DNA, 20 bp, Artificial Sequence
  Synthetic
actttagtcagtttcctcat

SEQ ID NO: 2013 - DNA, 20 bp, Artificial Sequence
  Synthetic
gtcgcagtagggcgcacgct

SEQ ID NO: 2014 - DNA, 20 bp, Artificial Sequence
  Synthetic
gcaagggccccaggacttag

SEQ ID NO: 2015 - DNA, 20 bp, Artificial Sequence
  Synthetic
ctagggggccatggatgcta

SEQ ID NO: 2016 - DNA, 20 bp, Artificial Sequence
  Synthetic
cccagagaaagatggcccaa

SEQ ID NO: 2017 - DNA, 20 bp, Artificial Sequence
  Synthetic
cagagtcttcctggtctggc

SEQ ID NO: 2018 - DNA, 20 bp, Artificial Sequence
  Synthetic
cacatgatacgacctgcaga

SEQ ID NO: 2019 - DNA, 20 bp, Artificial Sequence
  Synthetic
gggctagaagaagcagtgca

SEQ ID NO: 2020 - DNA, 20 bp, Artificial Sequence
  Synthetic
gcggacacggtacctgggct

SEQ ID NO: 2021 - DNA, 20 bp, Artificial Sequence
  Synthetic
ccagaacctcctggtgctat

SEQ ID NO: 2022 - DNA, 20 bp, Artificial Sequence
  Synthetic
tctgccagaagtccccgtag

SEQ ID NO: 2023 - DNA, 20 bp, Artificial Sequence
  Synthetic
ccagaagagaagggagaagc

SEQ ID NO: 2024 - DNA, 20 bp, Artificial Sequence
  Synthetic
tgctgacattcgaggccctc

SEQ ID NO: 2025 - DNA, 20 bp, Artificial Sequence
  Synthetic
ttcgagggtatacatgggct

SEQ ID NO: 2026 - DNA, 20 bp, Artificial Sequence
  Synthetic
caccaaggatctgatttagt

SEQ ID NO: 2027 - DNA, 20 bp, Artificial Sequence
  Synthetic
aatctaggatatatgtttct

SEQ ID NO: 2028 - DNA, 20 bp, Artificial Sequence
  Synthetic
aagagtgaaaacggtgttgt

SEQ ID NO: 2029 - DNA, 20 bp, Artificial Sequence
  Synthetic
gcagggcatgtctctgcaaa

SEQ ID NO: 2030 - DNA, 20 bp, Artificial Sequence
  Synthetic
tctcaggagatgaagtcttc

SEQ ID NO: 2031 - DNA, 20 bp, Artificial Sequence
  Synthetic
ttctcctaagaatgggaata

SEQ ID NO: 2032 - DNA, 20 bp, Artificial Sequence
  Synthetic
cagcaaggcctgcaggctgt

SEQ ID NO: 2033 - DNA, 20 bp, Artificial Sequence
  Synthetic
gactgagatggtgatctcgt

SEQ ID NO: 2034 - DNA, 20 bp, Artificial Sequence
  Synthetic
gccagtgctaatggtgctcc

SEQ ID NO: 2035 - DNA, 20 bp, Artificial Sequence
  Synthetic
acactaatttccgccaggta

SEQ ID NO: 2036 - DNA, 20 bp, Artificial Sequence
  Synthetic
ccacaaagacaatgtggtag

SEQ ID NO: 2037 - DNA, 20 bp, Artificial Sequence
  Synthetic
cgacagggaccagtcggtgg

SEQ ID NO: 2038 - DNA, 20 bp, Artificial Sequence
  Synthetic
taagatgcaggctctagagg

SEQ ID NO: 2039 - DNA, 20 bp, Artificial Sequence
  Synthetic
ggaagtgacgtgctgtgctg

SEQ ID NO: 2040 - DNA, 20 bp, Artificial Sequence
  Synthetic
aagcgttaaatatcggcatc

SEQ ID NO: 2041 - DNA, 20 bp, Artificial Sequence
  Synthetic
aagctgcaatctgaaaacaa

SEQ ID NO: 2042 - DNA, 20 bp, Artificial Sequence
  Synthetic
ccctggtgagacacctcctc

SEQ ID NO: 2043 - DNA, 20 bp, Artificial Sequence
  Synthetic
gtgaatgtagaggtctacag

SEQ ID NO: 2044 - DNA, 20 bp, Artificial Sequence
  Synthetic
tttcaacgcccccgccaccg

SEQ ID NO: 2045 - DNA, 20 bp, Artificial Sequence
  Synthetic
atactacatcaggattttgc

SEQ ID NO: 2046 - DNA, 20 bp, Artificial Sequence
  Synthetic
tcctagcattccaggaaagg

SEQ ID NO: 2047 - DNA, 20 bp, Artificial Sequence
  Synthetic
accttagcaccttcttccac

SEQ ID NO: 2048 - DNA, 20 bp, Artificial Sequence
  Synthetic
gtcacgggaaactgatcctc

SEQ ID NO: 2049 - DNA, 20 bp, Artificial Sequence
  Synthetic
ggccaaccacaggtcggagg

SEQ ID NO: 2050 - DNA, 20 bp, Artificial Sequence
  Synthetic
gcgttccaaggaggacggcc

SEQ ID NO: 2051 - DNA, 20 bp, Artificial Sequence
  Synthetic
ccaccatgtactctgcaggg

SEQ ID NO: 2052 - DNA, 20 bp, Artificial Sequence
  Synthetic
ctcaagggtaaaattcgctg

SEQ ID NO: 2053 - DNA, 20 bp, Artificial Sequence
  Synthetic
atactacaggagagagaaga

SEQ ID NO: 2054 - DNA, 20 bp, Artificial Sequence
  Synthetic
ctaatcccctaaggaaacag

SEQ ID NO: 2055 - DNA, 20 bp, Artificial Sequence
  Synthetic
gttcaagaagaagtcgctgg

SEQ ID NO: 2056 - DNA, 20 bp, Artificial Sequence
  Synthetic
cggagtcttgcaggaccacc

SEQ ID NO: 2057 - DNA, 20 bp, Artificial Sequence
  Synthetic
gtccggtatctaaaagacta

SEQ ID NO: 2058 - DNA, 20 bp, Artificial Sequence
  Synthetic
aaacaaaggtgcttcaataa

SEQ ID NO: 2059 - DNA, 20 bp, Artificial Sequence
  Synthetic
agttctcaggctgtgtaata

SEQ ID NO: 2060 - DNA, 20 bp, Artificial Sequence
  Synthetic
taattcattctaattggttc

SEQ ID NO: 2061 - DNA, 20 bp, Artificial Sequence
  Synthetic
ggagggtaaggagtgcaggt

SEQ ID NO: 2062 - DNA, 20 bp, Artificial Sequence
  Synthetic
cctaggggcgctcggccgcc

SEQ ID NO: 2063 - DNA, 20 bp, Artificial Sequence
  Synthetic
cccagggagaaggggagcat

SEQ ID NO: 2064 - DNA, 20 bp, Artificial Sequence
  Synthetic
gatagacagcctgcactggt

SEQ ID NO: 2065 - DNA, 20 bp, Artificial Sequence
  Synthetic
cacaagcactttttctgatt

SEQ ID NO: 2066 - DNA, 20 bp, Artificial Sequence
  Synthetic
tgtttcaagtgctggcagtg

SEQ ID NO: 2067 - DNA, 20 bp, Artificial Sequence
  Synthetic
gcccaagccttgccggacgc

SEQ ID NO: 2068 - DNA, 20 bp, Artificial Sequence
  Synthetic
atctcattctgcaggcagca

SEQ ID NO: 2069 - DNA, 20 bp, Artificial Sequence
  Synthetic
cgggagtagatgattagaaa

SEQ ID NO: 2070 - DNA, 20 bp, Artificial Sequence
  Synthetic
tggtgagacaggatgtggcc

SEQ ID NO: 2071 - DNA, 20 bp, Artificial Sequence
  Synthetic
gctagtccaggggcagcacc

SEQ ID NO: 2072 - DNA, 20 bp, Artificial Sequence
  Synthetic
cactctatttctgctggctg

SEQ ID NO: 2073 - DNA, 20 bp, Artificial Sequence
  Synthetic
cacccaccaaattccagctt

SEQ ID NO: 2074 - DNA, 20 bp, Artificial Sequence
  Synthetic
ggaggaaaaagatgaacctt

SEQ ID NO: 2075 - DNA, 20 bp, Artificial Sequence
  Synthetic
caggagtctcccctggggga

SEQ ID NO: 2076 - DNA, 20 bp, Artificial Sequence
  Synthetic
cctgacccagctggccagcc

SEQ ID NO: 2077 - DNA, 20 bp, Artificial Sequence
  Synthetic
ccgtggagcagagctcgcag

SEQ ID NO: 2078 - DNA, 20 bp, Artificial Sequence
  Synthetic
aggaacagttcattgatagc

SEQ ID NO: 2079 - DNA, 20 bp, Artificial Sequence
  Synthetic
tcttacagaatgtagccttt

SEQ ID NO: 2080 - DNA, 20 bp, Artificial Sequence
  Synthetic
gtctcaaacattgtcctgaa

SEQ ID NO: 2081 - DNA, 20 bp, Artificial Sequence
  Synthetic
actaaggactggcaggcact

SEQ ID NO: 2082 - DNA, 20 bp, Artificial Sequence
  Synthetic
cttcaggctgccccggctgc

SEQ ID NO: 2083 - DNA, 20 bp, Artificial Sequence
  Synthetic
gcctgaccatcaggaacatg

SEQ ID NO: 2084 - DNA, 20 bp, Artificial Sequence
  Synthetic
tcacactgacccagacctgg

SEQ ID NO: 2085 - DNA, 20 bp, Artificial Sequence
  Synthetic
cagaagtgaaagaggatctg

SEQ ID NO: 2086 - DNA, 20 bp, Artificial Sequence
  Synthetic
ggcactgtgacatcgatgag

SEQ ID NO: 2087 - DNA, 20 bp, Artificial Sequence
  Synthetic
ccagaattggatggcatccc

SEQ ID NO: 2088 - DNA, 20 bp, Artificial Sequence
  Synthetic
gatcgaaaacgcggcggcgg

SEQ ID NO: 2089 - DNA, 20 bp, Artificial Sequence
  Synthetic
aaacgtccacgcggtgcggg

SEQ ID NO: 2090 - DNA, 20 bp, Artificial Sequence
  Synthetic
agcacacaccttgtccaggt

SEQ ID NO: 2091 - DNA, 20 bp, Artificial Sequence
  Synthetic
ccttaggggctttgcccctg

SEQ ID NO: 2092 - DNA, 20 bp, Artificial Sequence
  Synthetic
gaatgagcttcttgcagcaa

SEQ ID NO: 2093 - DNA, 20 bp, Artificial Sequence
  Synthetic
ctggcagtagtaggggctga

SEQ ID NO: 2094 - DNA, 20 bp, Artificial Sequence
  Synthetic
ggagtcatgaggtacctgca

SEQ ID NO: 2095 - DNA, 20 bp, Artificial Sequence
  Synthetic
atgagcacgatgtagctata

SEQ ID NO: 2096 - DNA, 20 bp, Artificial Sequence
  Synthetic
ttccacttcaccggcacctg

SEQ ID NO: 2097 - DNA, 20 bp, Artificial Sequence
  Synthetic
ggcacacatcgaggagctgg

SEQ ID NO: 2098 - DNA, 20 bp, Artificial Sequence
  Synthetic
acaccaagccggctggctgc

SEQ ID NO: 2099 - DNA, 20 bp, Artificial Sequence
  Synthetic
ctcaggccacactgattcgc

SEQ ID NO: 2100 - DNA, 20 bp, Artificial Sequence
  Synthetic
tctctaataagcagtactgt

SEQ ID NO: 2101 - DNA, 20 bp, Artificial Sequence
  Synthetic
tggtttgaactggatatcgg

SEQ ID NO: 2102 - DNA, 20 bp, Artificial Sequence
  Synthetic
cccagtcaagatggtattcc

SEQ ID NO: 2103 - DNA, 20 bp, Artificial Sequence
  Synthetic
tccactatactctcaaggat

SEQ ID NO: 2104 - DNA, 20 bp, Artificial Sequence
  Synthetic
aagtcacagacgcttctttt

SEQ ID NO: 2105 - DNA, 20 bp, Artificial Sequence
  Synthetic
agcacagcatcgtcaccaac

SEQ ID NO: 2106 - DNA, 20 bp, Artificial Sequence
  Synthetic
atgtgaagattgccacctac

SEQ ID NO: 2107 - DNA, 20 bp, Artificial Sequence
  Synthetic
tgcatgagccgctctagcat

SEQ ID NO: 2108 - DNA, 20 bp, Artificial Sequence
  Synthetic
gaaacagggtttcaccatgt

SEQ ID NO: 2109 - DNA, 20 bp, Artificial Sequence
  Synthetic
gaagaaaagagaggccctaa

SEQ ID NO: 2110 - DNA, 20 bp, Artificial Sequence
  Synthetic
tagtgcagcaaaagcgcgcc

SEQ ID NO: 2111 - DNA, 20 bp, Artificial Sequence
  Synthetic
caaagaagagtgcggcagcg

SEQ ID NO: 2112 - DNA, 20 bp, Artificial Sequence
  Synthetic
agaaacataggcacatccac

SEQ ID NO: 2113 - DNA, 20 bp, Artificial Sequence
  Synthetic
tctcgcccaaccccaacctc

SEQ ID NO: 2114 - DNA, 20 bp, Artificial Sequence
  Synthetic
tttgattggtcctgttggct

SEQ ID NO: 2115 - DNA, 20 bp, Artificial Sequence
  Synthetic
ttctcatgtggaattttcca

SEQ ID NO: 2116 - DNA, 20 bp, Artificial Sequence
  Synthetic
cctccaggaggggtaggggt

SEQ ID NO: 2117 - DNA, 20 bp, Artificial Sequence
  Synthetic
gagtaccagaagagatacag

SEQ ID NO: 2118 - DNA, 20 bp, Artificial Sequence
  Synthetic
cgatgaggtacttcagggtg

SEQ ID NO: 2119 - DNA, 20 bp, Artificial Sequence
  Synthetic
attgaaccaccagggcctcg

SEQ ID NO: 2120 - DNA, 20 bp, Artificial Sequence
  Synthetic
cgagtagcaagaggtggaga

SEQ ID NO: 2121 - DNA, 20 bp, Artificial Sequence
  Synthetic
ctgagtcagcatctgccagc

SEQ ID NO: 2122 - DNA, 20 bp, Artificial Sequence
  Synthetic
tccagataggtgtgctttgt

SEQ ID NO: 2123 - DNA, 20 bp, Artificial Sequence
  Synthetic
tgatgacaccaagggagaaa

SEQ ID NO: 2124 - DNA, 20 bp, Artificial Sequence
  Synthetic
agcactgacgtctgggggag

SEQ ID NO: 2125 - DNA, 20 bp, Artificial Sequence
  Synthetic
ctgagattgagaaacctggg

SEQ ID NO: 2126 - DNA, 20 bp, Artificial Sequence
  Synthetic
aagctttcaacatctgtgaa

SEQ ID NO: 2127 - DNA, 20 bp, Artificial Sequence
  Synthetic
ggagcaaggtcctgctccga

SEQ ID NO: 2128 - DNA, 20 bp, Artificial Sequence
  Synthetic
ctatcttttcctctagagtc

SEQ ID NO: 2129 - DNA, 20 bp, Artificial Sequence
  Synthetic
aagtcattgctgtatgagcc

SEQ ID NO: 2130 - DNA, 20 bp, Artificial Sequence
  Synthetic
agtccagctaaagccctggc

SEQ ID NO: 2131 - DNA, 20 bp, Artificial Sequence
  Synthetic
cccaagttttcctggcctcc

SEQ ID NO: 2132 - DNA, 20 bp, Artificial Sequence
  Synthetic
catgaccatccagaacgccc

SEQ ID NO: 2133 - DNA, 20 bp, Artificial Sequence
  Synthetic
cctagagaacaaggaccccc

SEQ ID NO: 2134 - DNA, 20 bp, Artificial Sequence
  Synthetic
tttgggtcaactgtccacct

SEQ ID NO: 2135 - DNA, 20 bp, Artificial Sequence
  Synthetic
ggcctacatgtgtcctgcct

SEQ ID NO: 2136 - DNA, 20 bp, Artificial Sequence
  Synthetic
ataccaccgggcggcaaagc

SEQ ID NO: 2137 - DNA, 20 bp, Artificial Sequence
  Synthetic
agatgagaaagcttatctaa

SEQ ID NO: 2138 - DNA, 20 bp, Artificial Sequence
  Synthetic
cgagacaagccggggctccc

SEQ ID NO: 2139 - DNA, 20 bp, Artificial Sequence
  Synthetic
accctgctatgccagctggg

SEQ ID NO: 2140 - DNA, 20 bp, Artificial Sequence
  Synthetic
tccaggttaggccacttcac

SEQ ID NO: 2141 - DNA, 20 bp, Artificial Sequence
  Synthetic
cctgatgctataggtccatc

SEQ ID NO: 2142 - DNA, 20 bp, Artificial Sequence
  Synthetic
catccagctcataaccctaa

SEQ ID NO: 2143 - DNA, 20 bp, Artificial Sequence
  Synthetic
cttcaaggaatgtgaggtat

SEQ ID NO: 2144 - DNA, 20 bp, Artificial Sequence
  Synthetic
aggaccagagggacctggga

SEQ ID NO: 2145 - DNA, 20 bp, Artificial Sequence
  Synthetic
tattgtcacagatactccag

SEQ ID NO: 2146 - DNA, 20 bp, Artificial Sequence
  Synthetic
gggcctaggttcggaatgcc

SEQ ID NO: 2147 - DNA, 20 bp, Artificial Sequence
  Synthetic
tctacagggacttccggcag

SEQ ID NO: 2148 - DNA, 20 bp, Artificial Sequence
  Synthetic
tagccatgacctaattattt

SEQ ID NO: 2149 - DNA, 20 bp, Artificial Sequence
  Synthetic
gctcaaagctgacccaccgt

SEQ ID NO: 2150 - DNA, 20 bp, Artificial Sequence
  Synthetic
acaacatacaaagtggggat

SEQ ID NO: 2151 - DNA, 20 bp, Artificial Sequence
  Synthetic
cacaacacttttgggggtga

SEQ ID NO: 2152 - DNA, 20 bp, Artificial Sequence
  Synthetic
acagaaccccctggtccaca

SEQ ID NO: 2153 - DNA, 20 bp, Artificial Sequence
  Synthetic
cagccatgccttgtcgcaga

SEQ ID NO: 2154 - DNA, 20 bp, Artificial Sequence
  Synthetic
gagagtcagaagagatgcac

SEQ ID NO: 2155 - DNA, 20 bp, Artificial Sequence
  Synthetic
ttcaatatgttgatggagag

SEQ ID NO: 2156 - DNA, 20 bp, Artificial Sequence
  Synthetic
aaaataaagtaggagtactc

SEQ ID NO: 2157 - DNA, 20 bp, Artificial Sequence
  Synthetic
tgcagcaggagggaggtagg

SEQ ID NO: 2158 - DNA, 20 bp, Artificial Sequence
  Synthetic
ccagaagagaagggatcgcc

SEQ ID NO: 2159 - DNA, 20 bp, Artificial Sequence
  Synthetic
cgcgactactgcgcgcggga

SEQ ID NO: 2160 - DNA, 20 bp, Artificial Sequence
  Synthetic
catcaacaccaacgtgcagg

SEQ ID NO: 2161 - DNA, 20 bp, Artificial Sequence
  Synthetic
ttgttaagggctatgccggg

SEQ ID NO: 2162 - DNA, 20 bp, Artificial Sequence
  Synthetic
gatggagacactgtacctgc

SEQ ID NO: 2163 - DNA, 20 bp, Artificial Sequence
  Synthetic
ggggcacaggtagagctggg

SEQ ID NO: 2164 - DNA, 20 bp, Artificial Sequence
  Synthetic
cagagatgaaagaggatctg

SEQ ID NO: 2165 - DNA, 20 bp, Artificial Sequence
  Synthetic
aaatgacatcccaggagaaa

SEQ ID NO: 2166 - DNA, 20 bp, Artificial Sequence
  Synthetic
gctagccccaatggatttgc

SEQ ID NO: 2167 - DNA, 20 bp, Artificial Sequence
  Synthetic
ctaccttgcccatgaaatct

SEQ ID NO: 2168 - DNA, 20 bp, Artificial Sequence
  Synthetic
aacaatacagcttttagaaa

SEQ ID NO: 2169 - DNA, 20 bp, Artificial Sequence
  Synthetic
cagctgtcaggctttggagc

SEQ ID NO: 2170 - DNA, 20 bp, Artificial Sequence
  Synthetic
atctcagccaggggggcctg

SEQ ID NO: 2171 - DNA, 20 bp, Artificial Sequence
  Synthetic
ggagcgaccaggaggccatc

SEQ ID NO: 2172 - DNA, 20 bp, Artificial Sequence
  Synthetic
ggcgccgtaggccacggccc

SEQ ID NO: 2173 - DNA, 20 bp, Artificial Sequence
  Synthetic
tctagtccaggacccggtgc

SEQ ID NO: 2174 - DNA, 20 bp, Artificial Sequence
  Synthetic
caggccacagccaggggagg

SEQ ID NO: 2175 - DNA, 20 bp, Artificial Sequence
  Synthetic
ggagacgtagagggacagca

SEQ ID NO: 2176 - DNA, 20 bp, Artificial Sequence
  Synthetic
gacaatgatgttagatgcag

SEQ ID NO: 2177 - DNA, 20 bp, Artificial Sequence
  Synthetic
gttttagatagaccttaatg

SEQ ID NO: 2178 - DNA, 20 bp, Artificial Sequence
  Synthetic
cccagcgttgctggggctcc

SEQ ID NO: 2179 - DNA, 20 bp, Artificial Sequence
  Synthetic
gccgagcaggctggccacca

SEQ ID NO: 2180 - DNA, 20 bp, Artificial Sequence
  Synthetic
catgaagtcatgtccccgga

SEQ ID NO: 2181 - DNA, 20 bp, Artificial Sequence
  Synthetic
agataagcagtccctccaaa

SEQ ID NO: 2182 - DNA, 20 bp, Artificial Sequence
  Synthetic
gttgataacgctggtcctgc

SEQ ID NO: 2183 - DNA, 20 bp, Artificial Sequence
  Synthetic
cagccacaccagtacttcat

SEQ ID NO: 2184 - DNA, 20 bp, Artificial Sequence
  Synthetic
ccacaggcaccaggtgggcc

SEQ ID NO: 2185 - DNA, 20 bp, Artificial Sequence
  Synthetic
ggaaccaccagacgttggcc

SEQ ID NO: 2186 - DNA, 20 bp, Artificial Sequence
  Synthetic
cctggcagtaggcacccagc

SEQ ID NO: 2187 - DNA, 20 bp, Artificial Sequence
  Synthetic
tacttacaagctaaggatca

SEQ ID NO: 2188 - DNA, 20 bp, Artificial Sequence
  Synthetic
aagttcttaaagttcctggt

SEQ ID NO: 2189 - DNA, 20 bp, Artificial Sequence
  Synthetic
aagatagaaaattaattatt

SEQ ID NO: 2190 - DNA, 20 bp, Artificial Sequence
  Synthetic
aaagatgacaaaggaaatcc

SEQ ID NO: 2191 - DNA, 20 bp, Artificial Sequence
  Synthetic
tggttaaactgctctgatca

SEQ ID NO: 2192 - DNA, 20 bp, Artificial Sequence
  Synthetic
ctctcagaattggtcaaaga

SEQ ID NO: 2193 - DNA, 20 bp, Artificial Sequence
  Synthetic
gagcaaatttggataaagga

SEQ ID NO: 2194 - DNA, 20 bp, Artificial Sequence
  Synthetic
gaagaaaagaactgtgaatt

SEQ ID NO: 2195 - DNA, 20 bp, Artificial Sequence
  Synthetic
cctctcagtattcttggacc

SEQ ID NO: 2196 - DNA, 20 bp, Artificial Sequence
  Synthetic
cagcagaagaaaaggtgaga

SEQ ID NO: 2197 - DNA, 20 bp, Artificial Sequence
  Synthetic
gctgatgagaagggtccctc

SEQ ID NO: 2198 - DNA, 20 bp, Artificial Sequence
  Synthetic
ctagggccggcagcagtgac

SEQ ID NO: 2199 - DNA, 20 bp, Artificial Sequence
  Synthetic
atgggctaagcgctcagttt

SEQ ID NO: 2200 - DNA, 20 bp, Artificial Sequence
  Synthetic
ggtcagggtggcttatgcaa

SEQ ID NO: 2201 - DNA, 20 bp, Artificial Sequence
  Synthetic
tctgagtttcgagtcagggg

SEQ ID NO: 2202 - DNA, 20 bp, Artificial Sequence
  Synthetic
gcactaagagcactgcgaac

SEQ ID NO: 2203 - DNA, 20 bp, Artificial Sequence
  Synthetic
catggacccatgtgctggtg

SEQ ID NO: 2204 - DNA, 20 bp, Artificial Sequence
  Synthetic
cggaggcggcccacgatgga

SEQ ID NO: 2205 - DNA, 20 bp, Artificial Sequence
  Synthetic
tggccgtcacattgttgtcc

SEQ ID NO: 2206 - DNA, 20 bp, Artificial Sequence
  Synthetic
ggtccagacccactggctgc

SEQ ID NO: 2207 - DNA, 20 bp, Artificial Sequence
  Synthetic
cctccaggattccagaacct

SEQ ID NO: 2208 - DNA, 20 bp, Artificial Sequence
  Synthetic
gaagggcacatgccagacac

SEQ ID NO: 2209 - DNA, 20 bp, Artificial Sequence
  Synthetic
acctgatgtggttggtgctg

SEQ ID NO: 2210 - DNA, 20 bp, Artificial Sequence
  Synthetic
ttgctaaggggtatctacag

SEQ ID NO: 2211 - DNA, 20 bp, Artificial Sequence
  Synthetic
ccctgattcaagcgcaccct

SEQ ID NO: 2212 - DNA, 20 bp, Artificial Sequence
  Synthetic
gctagtcctcagacttcacg

SEQ ID NO: 2213 - DNA, 20 bp, Artificial Sequence
  Synthetic
gaacatggtcgctctggaca

SEQ ID NO: 2214 - DNA, 20 bp, Artificial Sequence
  Synthetic
ggatcaagccttcacgttgc

SEQ ID NO: 2215 - DNA, 20 bp, Artificial Sequence
  Synthetic
ctgggacacttcttcttctc

SEQ ID NO: 2216 - DNA, 20 bp, Artificial Sequence
  Synthetic
gctgcagccgggagagttcg

SEQ ID NO: 2217 - DNA, 20 bp, Artificial Sequence
  Synthetic
gcgcgagcagcgcaatggtc

SEQ ID NO: 2218 - DNA, 20 bp, Artificial Sequence
  Synthetic
aatcagttgaagcgccattc

SEQ ID NO: 2219 - DNA, 20 bp, Artificial Sequence
  Synthetic
ctacccgtccgtgaacttcc

SEQ ID NO: 2220 - DNA, 20 bp, Artificial Sequence
  Synthetic
ctgaggggccatggatgcta

SEQ ID NO: 2221 - DNA, 20 bp, Artificial Sequence
  Synthetic
ccggatgagaaaggtgaagg

SEQ ID NO: 2222 - DNA, 20 bp, Artificial Sequence
  Synthetic
tggggacccagcgcacgcag

SEQ ID NO: 2223 - DNA, 20 bp, Artificial Sequence
  Synthetic
gccatgcgcgcctggagagc

SEQ ID NO: 2224 - DNA, 20 bp, Artificial Sequence
  Synthetic
aagctcactccatgcagtac

SEQ ID NO: 2225 - DNA, 20 bp, Artificial Sequence
  Synthetic
ctgtggcagagggacaggac

SEQ ID NO: 2226 - DNA, 20 bp, Artificial Sequence
  Synthetic
gagcctcaggtggcagcccc

SEQ ID NO: 2227 - DNA, 20 bp, Artificial Sequence
  Synthetic
caggctagcctggtgggccc

SEQ ID NO: 2228 - DNA, 20 bp, Artificial Sequence
  Synthetic
ctcgaggcactctggcagca

SEQ ID NO: 2229 - DNA, 20 bp, Artificial Sequence
  Synthetic
ccgcccacacctgcagggag

SEQ ID NO: 2230 - DNA, 20 bp, Artificial Sequence
  Synthetic
cagtatgtgcaggtaccctg

SEQ ID NO: 2231 - DNA, 20 bp, Artificial Sequence
  Synthetic
gcatggtgaacacgtcctgc

SEQ ID NO: 2232 - DNA, 20 bp, Artificial Sequence
  Synthetic
ggacatgagtttcagcacgc

SEQ ID NO: 2233 - DNA, 20 bp, Artificial Sequence
  Synthetic
agagatgaaactggccctcc

SEQ ID NO: 2234 - DNA, 20 bp, Artificial Sequence
  Synthetic
ggcttagacctgggaggcgg

SEQ ID NO: 2235 - DNA, 20 bp, Artificial Sequence
  Synthetic
aagctacactccagctggat

SEQ ID NO: 2236 - DNA, 20 bp, Artificial Sequence
  Synthetic
cctgaccctgttggtgctgc

SEQ ID NO: 2237 - DNA, 20 bp, Artificial Sequence
  Synthetic
cctgtcgatgtaaaccacga

SEQ ID NO: 2238 - DNA, 20 bp, Artificial Sequence
  Synthetic
tcgctattcaatttcctgtt

SEQ ID NO: 2239 - DNA, 20 bp, Artificial Sequence
  Synthetic
aatagtgcccctggacaaag

SEQ ID NO: 2240 - DNA, 20 bp, Artificial Sequence
  Synthetic
cctaggagcccgggaatacc

SEQ ID NO: 2241 - DNA, 20 bp, Artificial Sequence
  Synthetic
atttgcagtggacgatggaa

SEQ ID NO: 2242 - DNA, 20 bp, Artificial Sequence
  Synthetic
gcggctagggcttggtctgg

SEQ ID NO: 2243 - DNA, 20 bp, Artificial Sequence
  Synthetic
ctgggcagggatggctgcct

SEQ ID NO: 2244 - DNA, 20 bp, Artificial Sequence
  Synthetic
tcttcacagggaagttttgg

SEQ ID NO: 2245 - DNA, 20 bp, Artificial Sequence
  Synthetic
tccagcctaggccttgaacc

SEQ ID NO: 2246 - DNA, 20 bp, Artificial Sequence
  Synthetic
atcctacaggtgcagcacca

SEQ ID NO: 2247 - DNA, 20 bp, Artificial Sequence
  Synthetic
cacctgagaagtcggctgag

SEQ ID NO: 2248 - DNA, 20 bp, Artificial Sequence
  Synthetic
tgcggcagaaggctgatagg

SEQ ID NO: 2249 - DNA, 20 bp, Artificial Sequence
  Synthetic
cccgatccccctggtacatc

SEQ ID NO: 2250 - DNA, 20 bp, Artificial Sequence
  Synthetic
ccgtgacagtgatggaagtg

SEQ ID NO: 2251 - DNA, 20 bp, Artificial Sequence
  Synthetic
cccagtcctgctggaagtcg

SEQ ID NO: 2252 - DNA, 20 bp, Artificial Sequence
  Synthetic
aatgcgccacaaaaccctgc

SEQ ID NO: 2253 - DNA, 20 bp, Artificial Sequence
  Synthetic
cactcaatcccaggggctct

SEQ ID NO: 2254 - DNA, 20 bp, Artificial Sequence
  Synthetic
tgtacgaaaaatgtgagtta

SEQ ID NO: 2255 - DNA, 20 bp, Artificial Sequence
  Synthetic
cgctatccagcaataccttg

SEQ ID NO: 2256 - DNA, 20 bp, Artificial Sequence
  Synthetic
agtgatgaagaaggaaagag

SEQ ID NO: 2257 - DNA, 20 bp, Artificial Sequence
  Synthetic
ccctagtgggacacctcctc

SEQ ID NO: 2258 - DNA, 20 bp, Artificial Sequence
  Synthetic
gatcctgatgtcggaggacc

SEQ ID NO: 2259 - DNA, 20 bp, Artificial Sequence
  Synthetic
ccactacaaacttgttggtg

SEQ ID NO: 2260 - DNA, 20 bp, Artificial Sequence
  Synthetic
gtattaccgcccccggtagt

SEQ ID NO: 2261 - DNA, 20 bp, Artificial Sequence
  Synthetic
gactatgtgcattttaggcc

SEQ ID NO: 2262 - DNA, 20 bp, Artificial Sequence
  Synthetic
ggccgcagcaagtgtgaatg

SEQ ID NO: 2263 - DNA, 20 bp, Artificial Sequence
  Synthetic
ccctgaggagcctggtctca

SEQ ID NO: 2264 - DNA, 20 bp, Artificial Sequence
  Synthetic
tgtctatcctaggtgtttgt

SEQ ID NO: 2265 - DNA, 20 bp, Artificial Sequence
  Synthetic
aaagatgatgctggccaacc

SEQ ID NO: 2266 - DNA, 20 bp, Artificial Sequence
  Synthetic
gtaagagtccacaccagctg

SEQ ID NO: 2267 - DNA, 20 bp, Artificial Sequence
  Synthetic
gctgatcctgctggtcccgc

SEQ ID NO: 2268 - DNA, 20 bp, Artificial Sequence
  Synthetic
gtgggtatgaaccactgtat

SEQ ID NO: 2269 - DNA, 20 bp, Artificial Sequence
  Synthetic
caaagcattcggtgatgaag

SEQ ID NO: 2270 - DNA, 20 bp, Artificial Sequence
  Synthetic
acctcagctagcgagctctc

SEQ ID NO: 2271 - DNA, 20 bp, Artificial Sequence
  Synthetic
atgggaaccgctacttcaag

SEQ ID NO: 2272 - DNA, 20 bp, Artificial Sequence
  Synthetic
gcagcacgacactgtggcca

SEQ ID NO: 2273 - DNA, 20 bp, Artificial Sequence
  Synthetic
gagtcatcccctcttgttca

SEQ ID NO: 2274 - DNA, 20 bp, Artificial Sequence
  Synthetic
cgatgtctactgccctctgg

SEQ ID NO: 2275 - DNA, 20 bp, Artificial Sequence
  Synthetic
gacctgcaccacaccttcat

SEQ ID NO: 2276 - DNA, 20 bp, Artificial Sequence
  Synthetic
cacccactacctggtgttag

SEQ ID NO: 2277 - DNA, 20 bp, Artificial Sequence
  Synthetic
cgcccatgtgcactcggatg

SEQ ID NO: 2278 - DNA, 20 bp, Artificial Sequence
  Synthetic
ccctagcttcgctggtgaga

SEQ ID NO: 2279 - DNA, 20 bp, Artificial Sequence
  Synthetic
ggtggcccatgtagcctggg

SEQ ID NO: 2280 - DNA, 20 bp, Artificial Sequence
  Synthetic
ccagcaaggcggcaaagagc

SEQ ID NO: 2281 - DNA, 20 bp, Artificial Sequence
  Synthetic
ccactttctcatgtgcaacc

SEQ ID NO: 2282 - DNA, 20 bp, Artificial Sequence
  Synthetic
tgggccacttgacgcggtcc

SEQ ID NO: 2283 - DNA, 20 bp, Artificial Sequence
  Synthetic
ggaacgaagccgcccaggaa

SEQ ID NO: 2284 - DNA, 20 bp, Artificial Sequence
  Synthetic
tcgagttcctggaaagataa

SEQ ID NO: 2285 - DNA, 20 bp, Artificial Sequence
  Synthetic
agctctagtccatgatgagg

SEQ ID NO: 2286 - DNA, 20 bp, Artificial Sequence
  Synthetic
gccattcgctaaaccccaac

SEQ ID NO: 2287 - DNA, 20 bp, Artificial Sequence
  Synthetic
agcccgccactgaggaggcc

SEQ ID NO: 2288 - DNA, 20 bp, Artificial Sequence
  Synthetic
agtaggaaaccaggagctaa

SEQ ID NO: 2289 - DNA, 20 bp, Artificial Sequence
  Synthetic
ttggtcctatcggttcatga

SEQ ID NO: 2290 - DNA, 20 bp, Artificial Sequence
  Synthetic
cgagcaggtgcacaaggtca

SEQ ID NO: 2291 - DNA, 20 bp, Artificial Sequence
  Synthetic
gtgtaatggagggccagggg

SEQ ID NO: 2292 - DNA, 20 bp, Artificial Sequence
  Synthetic
cagctagtctcctgagaaga

SEQ ID NO: 2293 - DNA, 20 bp, Artificial Sequence
  Synthetic
cagcccctacttcctgcata

SEQ ID NO: 2294 - DNA, 20 bp, Artificial Sequence
  Synthetic
ggggactggtttgccatccg

SEQ ID NO: 2295 - DNA, 20 bp, Artificial Sequence
  Synthetic
aatgactctcctggtgcccc

SEQ ID NO: 2296 - DNA, 20 bp, Artificial Sequence
  Synthetic
ttggcagatggcaccagtgc

SEQ ID NO: 2297 - DNA, 20 bp, Artificial Sequence
  Synthetic
cctgaaccccgcggtattcc

SEQ ID NO: 2298 - DNA, 20 bp, Artificial Sequence
  Synthetic
tactgctagggtgggcggac

SEQ ID NO: 2299 - DNA, 20 bp, Artificial Sequence
  Synthetic
acgagtttctctgggggcac

SEQ ID NO: 2300 - DNA, 20 bp, Artificial Sequence
  Synthetic
gcctgctaggccacttcacg

SEQ ID NO: 2301 - DNA, 20 bp, Artificial Sequence
  Synthetic
gtgtgagaacgacctctctc

SEQ ID NO: 2302 - DNA, 20 bp, Artificial Sequence
  Synthetic
gctctactcgccgccgaggt

SEQ ID NO: 2303 - DNA, 20 bp, Artificial Sequence
  Synthetic
cctgatcctgctggagccac

SEQ ID NO: 2304 - DNA, 20 bp, Artificial Sequence
  Synthetic
gctacttgcgcttctcgtgc

SEQ ID NO: 2305 - DNA, 20 bp, Artificial Sequence
  Synthetic
gtcggaccaagtggcgcaag

SEQ ID NO: 2306 - DNA, 20 bp, Artificial Sequence
  Synthetic
ctcagaagtcagatgcacca

SEQ ID NO: 2307 - DNA, 20 bp, Artificial Sequence
  Synthetic
cctcattctccattcttacc

SEQ ID NO: 2308 - DNA, 20 bp, Artificial Sequence
  Synthetic
ggatgctggtgaagccacct

SEQ ID NO: 2309 - DNA, 20 bp, Artificial Sequence
  Synthetic
ctacttctcagtcaagagct

SEQ ID NO: 2310 - DNA, 20 bp, Artificial Sequence
  Synthetic
aaagatccagctgggatacc

SEQ ID NO: 2311 - DNA, 20 bp, Artificial Sequence
  Synthetic
tcctgagttgctgtccccca

SEQ ID NO: 2312 - DNA, 20 bp, Artificial Sequence
  Synthetic
cctagagtcaacggtgctcc

SEQ ID NO: 2313 - DNA, 20 bp, Artificial Sequence
  Synthetic
gttagtccccctggcttcgc

SEQ ID NO: 2314 - DNA, 20 bp, Artificial Sequence
  Synthetic
agtgtgagccgccatcggcg

SEQ ID NO: 2315 - DNA, 20 bp, Artificial Sequence
  Synthetic
ccactagaaactttccccca

SEQ ID NO: 2316 - DNA, 20 bp, Artificial Sequence
  Synthetic
tgcgcaggcgccgctgctgc

SEQ ID NO: 2317 - DNA, 20 bp, Artificial Sequence
  Synthetic
tctgcaaacaccttttctat

SEQ ID NO: 2318 - DNA, 20 bp, Artificial Sequence
  Synthetic
ggtttaaatggtttccccag

SEQ ID NO: 2319 - DNA, 20 bp, Artificial Sequence
  Synthetic
ccccagagacgatgtaagtg

SEQ ID NO: 2320 - DNA, 20 bp, Artificial Sequence
  Synthetic
caggatccccctggtcctcc

SEQ ID NO: 2321 - DNA, 20 bp, Artificial Sequence
  Synthetic
tccccactccattgtggccc

SEQ ID NO: 2322 - DNA, 20 bp, Artificial Sequence
  Synthetic
tggcgtatggaaaaagcaac

SEQ ID NO: 2323 - DNA, 20 bp, Artificial Sequence
  Synthetic
ctcagctggagagaagtcga

SEQ ID NO: 2324 - DNA, 20 bp, Artificial Sequence
  Synthetic
cacctagctcttgaatgaca

SEQ ID NO: 2325 - DNA, 20 bp, Artificial Sequence
  Synthetic
cgtagtcttcctggagctga

SEQ ID NO: 2326 - DNA, 20 bp, Artificial Sequence
  Synthetic
ggacgtcccgccggggtcgc

SEQ ID NO: 2327 - DNA, 20 bp, Artificial Sequence
  Synthetic
cagggctacagcagcagcat

SEQ ID NO: 2328 - DNA, 20 bp, Artificial Sequence
  Synthetic
gcctcccagcaggtgcgatg

SEQ ID NO: 2329 - DNA, 20 bp, Artificial Sequence
  Synthetic
tcttactcgagatgtgatga

SEQ ID NO: 2330 - DNA, 20 bp, Artificial Sequence
  Synthetic
gatgaccctcctggactccc

SEQ ID NO: 2331 - DNA, 20 bp, Artificial Sequence
  Synthetic
actggcctagagcggccagg

SEQ ID NO: 2332 - DNA, 20 bp, Artificial Sequence
  Synthetic
acctcaaagggagaagccaa

SEQ ID NO: 2333 - DNA, 20 bp, Artificial Sequence
  Synthetic
tcaggctaaggggacagatg

SEQ ID NO: 2334 - DNA, 20 bp, Artificial Sequence
  Synthetic
cagcacctcccagttctgag

SEQ ID NO: 2335 - DNA, 20 bp, Artificial Sequence
  Synthetic
gctgaggctcccggcctccc

SEQ ID NO: 2336 - DNA, 20 bp, Artificial Sequence
  Synthetic
gactcttatgcaggttcggg

SEQ ID NO: 2337 - DNA, 20 bp, Artificial Sequence
  Synthetic
cctatgcagccagcacacct

SEQ ID NO: 2338 - DNA, 20 bp, Artificial Sequence
  Synthetic
ggatcagcttcattgtgctg

SEQ ID NO: 2339 - DNA, 20 bp, Artificial Sequence
  Synthetic
tcttaagggctggatggtgg

SEQ ID NO: 2340 - DNA, 20 bp, Artificial Sequence
  Synthetic
catctatgtggcctgtctcc

SEQ ID NO: 2341 - DNA, 20 bp, Artificial Sequence
  Synthetic
ccatcagcctgggcaacgtc

SEQ ID NO: 2342 - DNA, 20 bp, Artificial Sequence
  Synthetic
agtccagccagaaggcgtgc

SEQ ID NO: 2343 - DNA, 20 bp, Artificial Sequence
  Synthetic
aaggatgatgccggtgcacc

SEQ ID NO: 2344 - DNA, 20 bp, Artificial Sequence
  Synthetic
gctagggggaactgagcacc

SEQ ID NO: 2345 - DNA, 20 bp, Artificial Sequence
  Synthetic
tcctttatggagttttaaat

SEQ ID NO: 2346 - DNA, 20 bp, Artificial Sequence
  Synthetic
tccaactacagcgtctcctt

SEQ ID NO: 2347 - DNA, 20 bp, Artificial Sequence
  Synthetic
atgccctagggcccctgggg

SEQ ID NO: 2348 - DNA, 20 bp, Artificial Sequence
  Synthetic
ggactatgaaataatgctgt

SEQ ID NO: 2349 - DNA, 20 bp, Artificial Sequence
  Synthetic
gggcctagtcttccagggtg

SEQ ID NO: 2350 - DNA, 20 bp, Artificial Sequence
  Synthetic
ggctacgcaggggcccccgt

SEQ ID NO: 2351 - DNA, 20 bp, Artificial Sequence
  Synthetic
actgatttccctggtgctgc

SEQ ID NO: 2352 - DNA, 20 bp, Artificial Sequence
  Synthetic
ccccaatgacggccagcagg

SEQ ID NO: 2353 - DNA, 20 bp, Artificial Sequence
  Synthetic
actggagccccggaactcaa

SEQ ID NO: 2354 - DNA, 20 bp, Artificial Sequence
  Synthetic
gcatcatcccatgtctttag

SEQ ID NO: 2355 - DNA, 20 bp, Artificial Sequence
  Synthetic
cgtgagcttcctggtgagag

SEQ ID NO: 2356 - DNA, 20 bp, Artificial Sequence
  Synthetic
gctctcagagcaccgggtgc

SEQ ID NO: 2357 - DNA, 20 bp, Artificial Sequence
  Synthetic
catgcactccaggtgggcgc

SEQ ID NO: 2358 - DNA, 20 bp, Artificial Sequence
  Synthetic
acctgacccacctggacatt

SEQ ID NO: 2359 - DNA, 20 bp, Artificial Sequence
  Synthetic
ccagagcctcgaggtaacag

SEQ ID NO: 2360 - DNA, 20 bp, Artificial Sequence
  Synthetic
cttgaccttgaaggtcatgt

SEQ ID NO: 2361 - DNA, 20 bp, Artificial Sequence
  Synthetic
cctgatgctgctggtactcc

SEQ ID NO: 2362 - DNA, 20 bp, Artificial Sequence
  Synthetic
tgaccacctggcctcctacc

SEQ ID NO: 2363 - DNA, 20 bp, Artificial Sequence
  Synthetic
tgtggctgcagatggtgtgt

SEQ ID NO: 2364 - DNA, 20 bp, Artificial Sequence
  Synthetic
ggggggcaagcagctgctgc

SEQ ID NO: 2365 - DNA, 20 bp, Artificial Sequence
  Synthetic
aatctaggtctggtctccat

SEQ ID NO: 2366 - DNA, 20 bp, Artificial Sequence
  Synthetic
actacctattatctgagctc

SEQ ID NO: 2367 - DNA, 20 bp, Artificial Sequence
  Synthetic
ccgagagccccaggtcgaga

SEQ ID NO: 2368 - DNA, 20 bp, Artificial Sequence
  Synthetic
cttccagaggtgcttgaatc

SEQ ID NO: 2369 - DNA, 20 bp, Artificial Sequence
  Synthetic
gtggatcctgctggcaaaca

SEQ ID NO: 2370 - DNA, 20 bp, Artificial Sequence
  Synthetic
ccgggcagatggtctcagtg

SEQ ID NO: 2371 - DNA, 20 bp, Artificial Sequence
  Synthetic
ccaggagcctgtggggctcc

SEQ ID NO: 2372 - DNA, 20 bp, Artificial Sequence
  Synthetic
tcctagtccaaagggtgaca

SEQ ID NO: 2373 - DNA, 20 bp, Artificial Sequence
  Synthetic
gctgcaggtgaccgagggct

SEQ ID NO: 2374 - DNA, 20 bp, Artificial Sequence
  Synthetic
ggagaccctcctggagttgc

SEQ ID NO: 2375 - DNA, 20 bp, Artificial Sequence
  Synthetic
gccgatgcacctggagctcc

SEQ ID NO: 2376 - DNA, 20 bp, Artificial Sequence
  Synthetic
catggatgctcagcgtgatg

SEQ ID NO: 2377 - DNA, 20 bp, Artificial Sequence
  Synthetic
tgggggatcacttccgcatg

SEQ ID NO: 2378 - DNA, 20 bp, Artificial Sequence
  Synthetic
gatccggacaggggcctccc

SEQ ID NO: 2379 - DNA, 20 bp, Artificial Sequence
  Synthetic
cactcaggagaaagggtcgg

SEQ ID NO: 2380 - DNA, 20 bp, Artificial Sequence
  Synthetic
tctccctctacacactgcct

SEQ ID NO: 2381 - DNA, 20 bp, Artificial Sequence
  Synthetic
cccaggctggcaggacacaa

SEQ ID NO: 2382 - DNA, 20 bp, Artificial Sequence
  Synthetic
agattagatgaaccgcatgg

SEQ ID NO: 2383 - DNA, 20 bp, Artificial Sequence
  Synthetic
cccaagtgcccctggcccca

SEQ ID NO: 2384 - DNA, 20 bp, Artificial Sequence
  Synthetic
gggcccttagtgcgtcatcc

SEQ ID NO: 2385 - DNA, 20 bp, Artificial Sequence
  Synthetic
gccagccctccaggacctcc

SEQ ID NO: 2386 - DNA, 20 bp, Artificial Sequence
  Synthetic
tgctactgctgttgttgctg

SEQ ID NO: 2387 - DNA, 20 bp, Artificial Sequence
  Synthetic
cttactcgccggagtcccct

SEQ ID NO: 2388 - DNA, 20 bp, Artificial Sequence
  Synthetic
cttcgcttcatcctctcctc

SEQ ID NO: 2389 - DNA, 20 bp, Artificial Sequence
  Synthetic
gtcctactggtccagggggc

SEQ ID NO: 2390 - DNA, 20 bp, Artificial Sequence
  Synthetic
tccggtagaacagggactcc

SEQ ID NO: 2391 - DNA, 20 bp, Artificial Sequence
  Synthetic
cctgaaccccagggtcttcc

SEQ ID NO: 2392 - DNA, 20 bp, Artificial Sequence
  Synthetic
cgtcgtgctacaagccaacg

SEQ ID NO: 2393 - DNA, 20 bp, Artificial Sequence
  Synthetic
attgctggatgactggatgg

SEQ ID NO: 2394 - DNA, 20 bp, Artificial Sequence
  Synthetic
caagtactcgtgctagaact

SEQ ID NO: 2395 - DNA, 20 bp, Artificial Sequence
  Synthetic
accacctggtacttgctggc

SEQ ID NO: 2396 - DNA, 20 bp, Artificial Sequence
  Synthetic
ggcccagcctgccaagagga

SEQ ID NO: 2397 - DNA, 20 bp, Artificial Sequence
  Synthetic
gagttactgcattgctgacc

SEQ ID NO: 2398 - DNA, 20 bp, Artificial Sequence
  Synthetic
cgtctcagtcatggtacctg

SEQ ID NO: 2399 - DNA, 20 bp, Artificial Sequence
  Synthetic
agctcgtacccaaccaggtt

SEQ ID NO: 2400 - DNA, 20 bp, Artificial Sequence
  Synthetic
cttcagggagcgcttttcta

SEQ ID NO: 2401 - DNA, 20 bp, Artificial Sequence
  Synthetic
ccaccatgaggctaggagga

SEQ ID NO: 2402 - DNA, 20 bp, Artificial Sequence
  Synthetic
tcactccccattcaccctga

SEQ ID NO: 2403 - DNA, 20 bp, Artificial Sequence
  Synthetic
cgtgatccaccaggctcaag

SEQ ID NO: 2404 - DNA, 20 bp, Artificial Sequence
  Synthetic
ccacatgtccatcatcgtgc

SEQ ID NO: 2405 - DNA, 20 bp, Artificial Sequence
  Synthetic
ggcccccaccgcgggtaggt

SEQ ID NO: 2406 - DNA, 20 bp, Artificial Sequence
  Synthetic
ccagagccccccggccccaa

SEQ ID NO: 2407 - DNA, 20 bp, Artificial Sequence
  Synthetic
gacagtgctcgaggcagtga

SEQ ID NO: 2408 - DNA, 20 bp, Artificial Sequence
  Synthetic
gggctagagacccccaaggc

SEQ ID NO: 2409 - DNA, 20 bp, Artificial Sequence
  Synthetic
gcactcagggcgcctctgcc

SEQ ID NO: 2410 - DNA, 20 bp, Artificial Sequence
  Synthetic
tctagccctgcgtggagccc

SEQ ID NO: 2411 - DNA, 20 bp, Artificial Sequence
  Synthetic
agctctatcgctgggcaaag

SEQ ID NO: 2412 - DNA, 20 bp, Artificial Sequence
  Synthetic
ccagagcaaccaggccctcc

SEQ ID NO: 2413 - DNA, 20 bp, Artificial Sequence
  Synthetic
tcagcctagttccaggggat

SEQ ID NO: 2414 - DNA, 20 bp, Artificial Sequence
  Synthetic
tgtacccgtaaggggaagta

SEQ ID NO: 2415 - DNA, 20 bp, Artificial Sequence
  Synthetic
tctgaggaggctgtagggtt

SEQ ID NO: 2416 - DNA, 20 bp, Artificial Sequence
  Synthetic
tcgctctagaggtcgtggaa

SEQ ID NO: 2417 - DNA, 20 bp, Artificial Sequence
  Synthetic
gtaagtggcctctttatatg

SEQ ID NO: 2418 - DNA, 20 bp, Artificial Sequence
  Synthetic
cactacgaaaaggcctgtgg

SEQ ID NO: 2419 - DNA, 20 bp, Artificial Sequence
  Synthetic
cgctggcaagtatggtgcgg

SEQ ID NO: 2420 - DNA, 20 bp, Artificial Sequence
  Synthetic
actttactgttcggaactac

SEQ ID NO: 2421 - DNA, 20 bp, Artificial Sequence
  Synthetic
cactactgcatcatagatga

SEQ ID NO: 2422 - DNA, 20 bp, Artificial Sequence
  Synthetic
catccagagtgggccttgcc

SEQ ID NO: 2423 - DNA, 20 bp, Artificial Sequence
  Synthetic
aggatagtaaacttatcatc

SEQ ID NO: 2424 - DNA, 20 bp, Artificial Sequence
  Synthetic
agagctagtcacggtggaag

SEQ ID NO: 2425 - DNA, 20 bp, Artificial Sequence
  Synthetic
cctaggcgtcctcacgactt

SEQ ID NO: 2426 - DNA, 20 bp, Artificial Sequence
  Synthetic
accaggctgcgtgagtgtga

SEQ ID NO: 2427 - DNA, 20 bp, Artificial Sequence
  Synthetic
gtgttcaatgcagatgaaat

SEQ ID NO: 2428 - DNA, 20 bp, Artificial Sequence
  Synthetic
gctcactggtataccaaact

SEQ ID NO: 2429 - DNA, 20 bp, Artificial Sequence
  Synthetic
ctcatggtgctctggaccga

SEQ ID NO: 2430 - DNA, 20 bp, Artificial Sequence
  Synthetic
cctagacctccaggtgtaag

SEQ ID NO: 2431 - DNA, 20 bp, Artificial Sequence
  Synthetic
cccactgcaggatgtggtgc

SEQ ID NO: 2432 - DNA, 20 bp, Artificial Sequence
  Synthetic
cggcattcagctgactcgca

SEQ ID NO: 2433 - DNA, 20 bp, Artificial Sequence
  Synthetic
tttgctaagactgattactt

SEQ ID NO: 2434 - DNA, 20 bp, Artificial Sequence
  Synthetic
tcatttagaacagtctacaa

SEQ ID NO: 2435 - DNA, 20 bp, Artificial Sequence
  Synthetic
gtccctccaccacagtggag

SEQ ID NO: 2436 - DNA, 20 bp, Artificial Sequence
  Synthetic
gcagcagggtctcggagatc

SEQ ID NO: 2437 - DNA, 20 bp, Artificial Sequence
  Synthetic
gtggcacatgcagcacagga

SEQ ID NO: 2438 - DNA, 20 bp, Artificial Sequence
  Synthetic
gggctctagcccacgtacgg

SEQ ID NO: 2439 - DNA, 20 bp, Artificial Sequence
  Synthetic
agaacttgccaagtgcccgc

SEQ ID NO: 2440 - DNA, 20 bp, Artificial Sequence
  Synthetic
cctgagttccgaggacctgc

SEQ ID NO: 2441 - DNA, 20 bp, Artificial Sequence
  Synthetic
cctccagaaatgctggtagc

SEQ ID NO: 2442 - DNA, 20 bp, Artificial Sequence
  Synthetic
ttaattcacaattcttgatg

SEQ ID NO: 2443 - DNA, 20 bp, Artificial Sequence
  Synthetic
ctgccagggcgatgggggca

SEQ ID NO: 2444 - DNA, 20 bp, Artificial Sequence
  Synthetic
ccttagcggccagtgggtcc

SEQ ID NO: 2445 - DNA, 20 bp, Artificial Sequence
  Synthetic
ggtaggctctggcccacgta

SEQ ID NO: 2446 - DNA, 20 bp, Artificial Sequence
  Synthetic
tgcacttgaaccaggggtgc

SEQ ID NO: 2447 - DNA, 20 bp, Artificial Sequence
  Synthetic
cgcctcgagcctgctcatgg

SEQ ID NO: 2448 - DNA, 20 bp, Artificial Sequence
  Synthetic
ctccatctcgcagtagtcgc

SEQ ID NO: 2449 - DNA, 20 bp, Artificial Sequence
  Synthetic
ctggtagacaggcctggcag

SEQ ID NO: 2450 - DNA, 20 bp, Artificial Sequence
  Synthetic
gggggatgcccacggcacgc

SEQ ID NO: 2451 - DNA, 20 bp, Artificial Sequence
  Synthetic
agtgctgcactgcctgggtc

SEQ ID NO: 2452 - DNA, 20 bp, Artificial Sequence
  Synthetic
ggccatgcatgtgttcagaa

SEQ ID NO: 2453 - DNA, 20 bp, Artificial Sequence
  Synthetic
ggtggactcatcctgggggg

SEQ ID NO: 2454 - DNA, 20 bp, Artificial Sequence
  Synthetic
tcaaagtgctcctggctccg

SEQ ID NO: 2455 - DNA, 20 bp, Artificial Sequence
  Synthetic
tgtctcagttctcactggtc

SEQ ID NO: 2456 - DNA, 20 bp, Artificial Sequence
  Synthetic
agctgactggctacacagcc

SEQ ID NO: 2457 - DNA, 20 bp, Artificial Sequence
  Synthetic
ccgccaccaggcgcaggtcg

SEQ ID NO: 2458 - DNA, 20 bp, Artificial Sequence
  Synthetic
ggtggtccaggagcgagcag

SEQ ID NO: 2459 - DNA, 20 bp, Artificial Sequence
  Synthetic
gtatgatgtggtggtggcag

SEQ ID NO: 2460 - DNA, 20 bp, Artificial Sequence
  Synthetic
agcactcctcagcatctgcc

SEQ ID NO: 2461 - DNA, 20 bp, Artificial Sequence
  Synthetic
atctaggaacctgatgacgc

SEQ ID NO: 2462 - DNA, 20 bp, Artificial Sequence
  Synthetic
cttggatggggtccacaccg

SEQ ID NO: 2463 - DNA, 20 bp, Artificial Sequence
  Synthetic
acttgctactgctgttgtcc

SEQ ID NO: 2464 - DNA, 20 bp, Artificial Sequence
  Synthetic
agccactgggtcatggtctc

SEQ ID NO: 2465 - DNA, 20 bp, Artificial Sequence
  Synthetic
cccaatgctgcctgcattcg

SEQ ID NO: 2466 - DNA, 20 bp, Artificial Sequence
  Synthetic
acacccatcgcattggagaa

SEQ ID NO: 2467 - DNA, 20 bp, Artificial Sequence
  Synthetic
gttagtgctgccggtgctac

SEQ ID NO: 2468 - DNA, 20 bp, Artificial Sequence
  Synthetic
gggaggctagaagccgcgcg

SEQ ID NO: 2469 - DNA, 20 bp, Artificial Sequence
  Synthetic
tgttcaaggtgaaccattaa

SEQ ID NO: 2470 - DNA, 20 bp, Artificial Sequence
  Synthetic
ctgcaggcctcgtctggggg

SEQ ID NO: 2471 - DNA, 20 bp, Artificial Sequence
  Synthetic
tggctaggactgagagacca

SEQ ID NO: 2472 - DNA, 20 bp, Artificial Sequence
  Synthetic
tcctgctcagtccgccttcc

SEQ ID NO: 2473 - DNA, 20 bp, Artificial Sequence
  Synthetic
tccctatggggggccactgg

SEQ ID NO: 2474 - DNA, 20 bp, Artificial Sequence
  Synthetic
gcggctgctaccctagacgc

SEQ ID NO: 2475 - DNA, 20 bp, Artificial Sequence
  Synthetic
agcctaccattcatggaatt

SEQ ID NO: 2476 - DNA, 20 bp, Artificial Sequence
  Synthetic
acatatccttggccctgaat

SEQ ID NO: 2477 - DNA, 20 bp, Artificial Sequence
  Synthetic
cccagcctccctggaccccg

SEQ ID NO: 2478 - DNA, 20 bp, Artificial Sequence
  Synthetic
cgtggaccgtggtacctggg

SEQ ID NO: 2479 - DNA, 20 bp, Artificial Sequence
  Synthetic
cagctacagccaccttagtt

SEQ ID NO: 2480 - DNA, 20 bp, Artificial Sequence
  Synthetic
cgatgagacccagacaaggc

SEQ ID NO: 2481 - DNA, 20 bp, Artificial Sequence
  Synthetic
ctagttctcgaggcccgctg

SEQ ID NO: 2482 - DNA, 20 bp, Artificial Sequence
  Synthetic
agctgctataaagagcccat

SEQ ID NO: 2483 - DNA, 20 bp, Artificial Sequence
  Synthetic
tctcttagcgcacaaagccc

SEQ ID NO: 2484 - DNA, 20 bp, Artificial Sequence
  Synthetic
ctggagccggcagcagtgac

SEQ ID NO: 2485 - DNA, 20 bp, Artificial Sequence
  Synthetic
agtgaacctcctggcaaaga

SEQ ID NO: 2486 - DNA, 20 bp, Artificial Sequence
  Synthetic
cccagacgtgcctggaccca

SEQ ID NO: 2487 - DNA, 20 bp, Artificial Sequence
  Synthetic
cctgttagctcggaatggct

SEQ ID NO: 2488 - DNA, 20 bp, Artificial Sequence
  Synthetic
accgagctgcgtgagtgtga

SEQ ID NO: 2489 - DNA, 20 bp, Artificial Sequence
  Synthetic
aggccctcaaggcgagctgc

SEQ ID NO: 2490 - DNA, 20 bp, Artificial Sequence
  Synthetic
ttggtagcaacagacccgtc

SEQ ID NO: 2491 - DNA, 20 bp, Artificial Sequence
  Synthetic
gtctatgtgacagatgcctc

SEQ ID NO: 2492 - DNA, 20 bp, Artificial Sequence
  Synthetic
atgtctcacggtaccttgtc

SEQ ID NO: 2493 - DNA, 20 bp, Artificial Sequence
  Synthetic
ggctctaccggactgcatcc

SEQ ID NO: 2494 - DNA, 20 bp, Artificial Sequence
  Synthetic
tgtatggacctctttgcccc

SEQ ID NO: 2495 - DNA, 20 bp, Artificial Sequence
  Synthetic
cttcagggaggtgaaccagc

SEQ ID NO: 2496 - DNA, 20 bp, Artificial Sequence
  Synthetic
ccccagaccccctggcccca

SEQ ID NO: 2497 - DNA, 20 bp, Artificial Sequence
  Synthetic
gacgcagatctggacaccag

SEQ ID NO: 2498 - DNA, 20 bp, Artificial Sequence
  Synthetic
agcctacctctgggcctcct

SEQ ID NO: 2499 - DNA, 20 bp, Artificial Sequence
  Synthetic
gctagtcctcctgggccacc

SEQ ID NO: 2500 - DNA, 20 bp, Artificial Sequence
  Synthetic
cctagcgccagcagatccaa

SEQ ID NO: 2501 - DNA, 20 bp, Artificial Sequence
  Synthetic
cgtgaagctgctggcatcaa

SEQ ID NO: 2502 - DNA, 20 bp, Artificial Sequence
  Synthetic
ccggcaagccaacaccttct

SEQ ID NO: 2503 - DNA, 20 bp, Artificial Sequence
  Synthetic
gccaggtcagcgaaggtcag

SEQ ID NO: 2504 - DNA, 20 bp, Artificial Sequence
  Synthetic
cctgctacaccagggcctgg

SEQ ID NO: 2505 - DNA, 20 bp, Artificial Sequence
  Synthetic
gctcctcaggggcgctcccc

SEQ ID NO: 2506 - DNA, 20 bp, Artificial Sequence
  Synthetic
gcaaccactgcctgaaggaa

SEQ ID NO: 2507 - DNA, 20 bp, Artificial Sequence
  Synthetic
cctcaaggccctgggggacc

SEQ ID NO: 2508 - DNA, 20 bp, Artificial Sequence
  Synthetic
ctcctagaacccacccaaaa

SEQ ID NO: 2509 - DNA, 20 bp, Artificial Sequence
  Synthetic
tggctacagctgcagagagc

SEQ ID NO: 2510 - DNA, 20 bp, Artificial Sequence
  Synthetic
gggctacgcgcacgacttga

SEQ ID NO: 2511 - DNA, 20 bp, Artificial Sequence
  Synthetic
caaggtctatgtcttttcct

SEQ ID NO: 2512 - DNA, 20 bp, Artificial Sequence
  Synthetic
cctagtccagctggctccaa

SEQ ID NO: 2513 - DNA, 20 bp, Artificial Sequence
  Synthetic
ctgggagaatggccaccact

SEQ ID NO: 2514 - DNA, 20 bp, Artificial Sequence
  Synthetic
agagaagctgctggagaacc

SEQ ID NO: 2515 - DNA, 20 bp, Artificial Sequence
  Synthetic
cctgacgctcctggtcatcc

SEQ ID NO: 2516 - DNA, 20 bp, Artificial Sequence
  Synthetic
aatgccactgtgaccgcaag

SEQ ID NO: 2517 - DNA, 20 bp, Artificial Sequence
  Synthetic
gctagcccaccttgctgctc

SEQ ID NO: 2518 - DNA, 20 bp, Artificial Sequence
  Synthetic
ggccgtgtagaatgcccagg

SEQ ID NO: 2519 - DNA, 20 bp, Artificial Sequence
  Synthetic
cgtagtgcaagtggccctgc

SEQ ID NO: 2520 - DNA, 20 bp, Artificial Sequence
  Synthetic
ctcctgatgcattgaggcac

SEQ ID NO: 2521 - DNA, 20 bp, Artificial Sequence
  Synthetic
ctcgtgctacagcccccctg

SEQ ID NO: 2522 - DNA, 20 bp, Artificial Sequence
  Synthetic
tctagggagctatgccagga

SEQ ID NO: 2523 - DNA, 20 bp, Artificial Sequence
  Synthetic
ccggctgcaggataggcagg

SEQ ID NO: 2524 - DNA, 20 bp, Artificial Sequence
  Synthetic
ttcacctagtccagatgccc

SEQ ID NO: 2525 - DNA, 20 bp, Artificial Sequence
  Synthetic
ctcagttccggatcaggatc

SEQ ID NO: 2526 - DNA, 20 bp, Artificial Sequence
  Synthetic
tgctcactgatagaaagctt

SEQ ID NO: 2527 - DNA, 20 bp, Artificial Sequence
  Synthetic
gccagggagcctggaaagcc

SEQ ID NO: 2528 - DNA, 20 bp, Artificial Sequence
  Synthetic
tttccccagattccctggac

SEQ ID NO: 2529 - DNA, 20 bp, Artificial Sequence
  Synthetic
tccacttcacccccggcttg

SEQ ID NO: 2530 - DNA, 20 bp, Artificial Sequence
  Synthetic
gtagatgcccctggtcctgc

SEQ ID NO: 2531 - DNA, 20 bp, Artificial Sequence
  Synthetic
tcctcagtgagatcattgaa

SEQ ID NO: 2532 - DNA, 20 bp, Artificial Sequence
  Synthetic
tacctatgcagaacccaaag

SEQ ID NO: 2533 - DNA, 20 bp, Artificial Sequence
  Synthetic
agagggggtagcacatgggc

SEQ ID NO: 2534 - DNA, 20 bp, Artificial Sequence
  Synthetic
tttgctactgacacataaaa

SEQ ID NO: 2535 - DNA, 20 bp, Artificial Sequence
  Synthetic
ccagacttcccaggtgcccc

SEQ ID NO: 2536 - DNA, 20 bp, Artificial Sequence
  Synthetic
cacctagctcgtctccgtct

SEQ ID NO: 2537 - DNA, 20 bp, Artificial Sequence
  Synthetic
gctagttggagctgacgctt

SEQ ID NO: 2538 - DNA, 20 bp, Artificial Sequence
  Synthetic
acctgaccgtgaacccacag

SEQ ID NO: 2539 - DNA, 20 bp, Artificial Sequence
  Synthetic
ccaaggcctcccggtctccc

SEQ ID NO: 2540 - DNA, 20 bp, Artificial Sequence
  Synthetic
ccggcaggtctacattgagc

SEQ ID NO: 2541 - DNA, 20 bp, Artificial Sequence
  Synthetic
cggggtatggtggagtactt

SEQ ID NO: 2542 - DNA, 20 bp, Artificial Sequence
  Synthetic
ggtctgatctctgatccagc

SEQ ID NO: 2543 - DNA, 20 bp, Artificial Sequence
  Synthetic
aatgaattgcaaggtctgcc

SEQ ID NO: 2544 - DNA, 20 bp, Artificial Sequence
  Synthetic
tactagggaggctctgggcc

SEQ ID NO: 2545 - DNA, 20 bp, Artificial Sequence
  Synthetic
accctactgtgccagctggg

SEQ ID NO: 2546 - DNA, 20 bp, Artificial Sequence
  Synthetic
cgccagtccccgtggtgaag

SEQ ID NO: 2547 - DNA, 20 bp, Artificial Sequence
  Synthetic
tcccacgggcgcccgtgcgc

SEQ ID NO: 2548 - DNA, 20 bp, Artificial Sequence
  Synthetic
caagtagctggccaacttct

SEQ ID NO: 2549 - DNA, 20 bp, Artificial Sequence
  Synthetic
ggcttacgcttccagagctt

SEQ ID NO: 2550 - DNA, 20 bp, Artificial Sequence
  Synthetic
gaactacctcttgagtcttt

SEQ ID NO: 2551 - DNA, 20 bp, Artificial Sequence
  Synthetic
cactacaggcccggcacgtc

SEQ ID NO: 2552 - DNA, 20 bp, Artificial Sequence
  Synthetic
tccccagccgcctgcaagga

SEQ ID NO: 2553 - DNA, 20 bp, Artificial Sequence
  Synthetic
agaagtgaacgtggtctacc

SEQ ID NO: 2554 - DNA, 20 bp, Artificial Sequence
  Synthetic
tttggagagccactccaaga

SEQ ID NO: 2555 - DNA, 20 bp, Artificial Sequence
  Synthetic
cctactcccggatgttcttg

SEQ ID NO: 2556 - DNA, 20 bp, Artificial Sequence
  Synthetic
gccccactcacacctgagag

SEQ ID NO: 2557 - DNA, 20 bp, Artificial Sequence
  Synthetic
gctgatccccctggtcccga

SEQ ID NO: 2558 - DNA, 20 bp, Artificial Sequence
  Synthetic
gtcaggccagtgctcgccac

SEQ ID NO: 2559 - DNA, 20 bp, Artificial Sequence
  Synthetic
tggacagctggtgggtcatc

SEQ ID NO: 2560 - DNA, 20 bp, Artificial Sequence
  Synthetic
gactaggctcccagggcaca

SEQ ID NO: 2561 - DNA, 20 bp, Artificial Sequence
  Synthetic
cgtagtgaggtcggtcctgc

SEQ ID NO: 2562 - DNA, 20 bp, Artificial Sequence
  Synthetic
atcatgggccgcgtgtggat

SEQ ID NO: 2563 - DNA, 20 bp, Artificial Sequence
  Synthetic
ggggccccatgagggagaca

SEQ ID NO: 2564 - DNA, 20 bp, Artificial Sequence
  Synthetic
gcccagcctcccgggtcccc

SEQ ID NO: 2565 - DNA, 20 bp, Artificial Sequence
  Synthetic
tcctagggaagctgacaaag

SEQ ID NO: 2566 - DNA, 20 bp, Artificial Sequence
  Synthetic
gtatcgggggcggcccacga

SEQ ID NO: 2567 - DNA, 20 bp, Artificial Sequence
  Synthetic
cctaggcaatgatggcaatg

SEQ ID NO: 2568 - DNA, 20 bp, Artificial Sequence
  Synthetic
ggcatggctgcttggtctcc

SEQ ID NO: 2569 - DNA, 20 bp, Artificial Sequence
  Synthetic
gtgtctactgtctaagtgct

SEQ ID NO: 2570 - DNA, 20 bp, Artificial Sequence
  Synthetic
cgcaaggtcctcttcaccac

SEQ ID NO: 2571 - DNA, 20 bp, Artificial Sequence
  Synthetic
ggggcaagcggctgcgcgcg

SEQ ID NO: 2572 - DNA, 20 bp, Artificial Sequence
  Synthetic
agaggcatgtggccagcagc

SEQ ID NO: 2573 - DNA, 20 bp, Artificial Sequence
  Synthetic
ctgctagctcaggctcttga

SEQ ID NO: 2574 - DNA, 20 bp, Artificial Sequence
  Synthetic
ggtgccaggcctccgtggtg

SEQ ID NO: 2575 - DNA, 20 bp, Artificial Sequence
  Synthetic
cacccactgcatcacaccca

SEQ ID NO: 2576 - DNA, 20 bp, Artificial Sequence
  Synthetic
aatagcccaaagaatctcaa

SEQ ID NO: 2577 - DNA, 20 bp, Artificial Sequence
  Synthetic
tactaggttgaccctaacca

SEQ ID NO: 2578 - DNA, 20 bp, Artificial Sequence
  Synthetic
ccactatcagtgggtagatg

SEQ ID NO: 2579 - DNA, 20 bp, Artificial Sequence
  Synthetic
tgccataagccttcacctta

SEQ ID NO: 2580 - DNA, 20 bp, Artificial Sequence
  Synthetic
ccagacccacctggtcctgt

SEQ ID NO: 2581 - DNA, 20 bp, Artificial Sequence
  Synthetic
cctagtccccctggccctcc

SEQ ID NO: 2582 - DNA, 20 bp, Artificial Sequence
  Synthetic
ggaccacttcctcattcatc

SEQ ID NO: 2583 - DNA, 20 bp, Artificial Sequence
  Synthetic
cctgattctcgtggtcttcc

SEQ ID NO: 2584 - DNA, 20 bp, Artificial Sequence
  Synthetic
tccgttacctcagcagccgc

SEQ ID NO: 2585 - DNA, 20 bp, Artificial Sequence
  Synthetic
gctatgactcttgagacttg

SEQ ID NO: 2586 - DNA, 20 bp, Artificial Sequence
  Synthetic
tgatcctgccggaggcgtag

SEQ ID NO: 2587 - DNA, 20 bp, Artificial Sequence
  Synthetic
caaccccaccagctgcttgt

SEQ ID NO: 2588 - DNA, 20 bp, Artificial Sequence
  Synthetic
acgatatgtcgccagatcaa

SEQ ID NO: 2589 - DNA, 20 bp, Artificial Sequence
  Synthetic
ccttattccaatcccaggta

SEQ ID NO: 2590 - DNA, 20 bp, Artificial Sequence
  Synthetic
catgcagcctctgtccaaca

SEQ ID NO: 2591 - DNA, 20 bp, Artificial Sequence
  Synthetic
gctagttcacgcccgcgccc

SEQ ID NO: 2592 - DNA, 20 bp, Artificial Sequence
  Synthetic
ccagaccctcctggacctcc

SEQ ID NO: 2593 - DNA, 20 bp, Artificial Sequence
  Synthetic
ctacctgcacatctgggtgc

SEQ ID NO: 2594 - DNA, 20 bp, Artificial Sequence
  Synthetic
ctgctagggcatcatggcag

SEQ ID NO: 2595 - DNA, 20 bp, Artificial Sequence
  Synthetic
tccttctgagctcgctgctg

SEQ ID NO: 2596 - DNA, 20 bp, Artificial Sequence
  Synthetic
aaggcagcgtggcactagga

SEQ ID NO: 2597 - DNA, 20 bp, Artificial Sequence
  Synthetic
acccatctccactggggttt

SEQ ID NO: 2598 - DNA, 20 bp, Artificial Sequence
  Synthetic
caagacccacgtggtgacaa

SEQ ID NO: 2599 - DNA, 20 bp, Artificial Sequence
  Synthetic
aaacccagccccagctccca

SEQ ID NO: 2600 - DNA, 20 bp, Artificial Sequence
  Synthetic
ccttcaccctgacgctctcc

SEQ ID NO: 2601 - DNA, 20 bp, Artificial Sequence
  Synthetic
tgatcactgtgaggctccat

SEQ ID NO: 2602 - DNA, 20 bp, Artificial Sequence
  Synthetic
aggttatccacaggtccttg

SEQ ID NO: 2603 - DNA, 20 bp, Artificial Sequence
  Synthetic
ggtgcacgcaaacaccatct

SEQ ID NO: 2604 - DNA, 20 bp, Artificial Sequence
  Synthetic
cgcagccatggagggtgatc

SEQ ID NO: 2605 - DNA, 20 bp, Artificial Sequence
  Synthetic
ctcccagcagcccctgggaa

SEQ ID NO: 2606 - DNA, 20 bp, Artificial Sequence
  Synthetic
tgctaggcatggactggggc

SEQ ID NO: 2607 - DNA, 20 bp, Artificial Sequence
  Synthetic
tcttagaagtcctggtccaa

SEQ ID NO: 2608 - DNA, 20 bp, Artificial Sequence
  Synthetic
ctctagggaggagaaatccc

SEQ ID NO: 2609 - DNA, 20 bp, Artificial Sequence
  Synthetic
tcttatgcaatgaacatcaa

SEQ ID NO: 2610 - DNA, 20 bp, Artificial Sequence
  Synthetic
catagttgcagcccaagtca

SEQ ID NO: 2611 - DNA, 20 bp, Artificial Sequence
  Synthetic
ccctcaaggacgccgacctg

SEQ ID NO: 2612 - DNA, 20 bp, Artificial Sequence
  Synthetic
tctaggtcattccaaccccc

SEQ ID NO: 2613 - DNA, 20 bp, Artificial Sequence
  Synthetic
ttcctaggagagatggatgg

SEQ ID NO: 2614 - DNA, 20 bp, Artificial Sequence
  Synthetic
gcaagtgatggcgacctagt

SEQ ID NO: 2615 - DNA, 20 bp, Artificial Sequence
  Synthetic
ggcctagctgccctgtgagc

SEQ ID NO: 2616 - DNA, 20 bp, Artificial Sequence
  Synthetic
ccgggaccagcctgcaggaa

SEQ ID NO: 2617 - DNA, 20 bp, Artificial Sequence
  Synthetic
caactataatccagctccag

SEQ ID NO: 2618 - DNA, 20 bp, Artificial Sequence
  Synthetic
ctgaccgccctcggcgtccg

SEQ ID NO: 2619 - DNA, 20 bp, Artificial Sequence
  Synthetic
gtcgttccacagccgtctgg

SEQ ID NO: 2620 - DNA, 20 bp, Artificial Sequence
  Synthetic
agactagaaacgctcaaata

SEQ ID NO: 2621 - DNA, 20 bp, Artificial Sequence
  Synthetic
cgctgatgcattcatccagg

SEQ ID NO: 2622 - DNA, 20 bp, Artificial Sequence
  Synthetic
catagcgatccgcgagagcg

SEQ ID NO: 2623 - DNA, 20 bp, Artificial Sequence
  Synthetic
cctggtcagccaggggtacc

SEQ ID NO: 2624 - DNA, 20 bp, Artificial Sequence
  Synthetic
cgtactcgatggggtacttc

SEQ ID NO: 2625 - DNA, 20 bp, Artificial Sequence
  Synthetic
tcaggctagggggacaggtg

SEQ ID NO: 2626 - DNA, 20 bp, Artificial Sequence
  Synthetic
ctattgcaatcccttaagca

SEQ ID NO: 2627 - DNA, 20 bp, Artificial Sequence
  Synthetic
agccggacttacagtcacag

SEQ ID NO: 2628 - DNA, 20 bp, Artificial Sequence
  Synthetic
gcagaggccccaggacttag

SEQ ID NO: 2629 - DNA, 20 bp, Artificial Sequence
  Synthetic
cttacaggccagcctgccta

SEQ ID NO: 2630 - DNA, 20 bp, Artificial Sequence
  Synthetic
gaatgattcttcaccaaggt

SEQ ID NO: 2631 - DNA, 20 bp, Artificial Sequence
  Synthetic
ggtggcctatggagttgcta

SEQ ID NO: 2632 - DNA, 20 bp, Artificial Sequence
  Synthetic
aaagatgaaggaggccctcc

SEQ ID NO: 2633 - DNA, 20 bp, Artificial Sequence
  Synthetic
ccgctacagcttgtcctgag

SEQ ID NO: 2634 - DNA, 20 bp, Artificial Sequence
  Synthetic
ccactacctgctggtgaccc

SEQ ID NO: 2635 - DNA, 20 bp, Artificial Sequence
  Synthetic
gccgcaccactacgacgacc

SEQ ID NO: 2636 - DNA, 20 bp, Artificial Sequence
  Synthetic
cttacctgcctgacacttgc

SEQ ID NO: 2637 - DNA, 20 bp, Artificial Sequence
  Synthetic
cacgtagcttgcgcggcgcg

SEQ ID NO: 2638 - DNA, 20 bp, Artificial Sequence
  Synthetic
ggttaggcaatactgccttt

SEQ ID NO: 2639 - DNA, 20 bp, Artificial Sequence
  Synthetic
tctggaacccaggggatcac

SEQ ID NO: 2640 - DNA, 20 bp, Artificial Sequence
  Synthetic
cctgatgcccctggtgaaaa

SEQ ID NO: 2641 - DNA, 20 bp, Artificial Sequence
  Synthetic
caccagaagcactactgacc

SEQ ID NO: 2642 - DNA, 20 bp, Artificial Sequence
  Synthetic
gttaggggcccagaaggttc

SEQ ID NO: 2643 - DNA, 20 bp, Artificial Sequence
  Synthetic
gtgagtcttccaggcctctc

SEQ ID NO: 2644 - DNA, 20 bp, Artificial Sequence
  Synthetic
ggcatctggactctgtcacc

SEQ ID NO: 2645 - DNA, 20 bp, Artificial Sequence
  Synthetic
gtcagtcctgctggccccaa

SEQ ID NO: 2646 - DNA, 20 bp, Artificial Sequence
  Synthetic
ggagctaaacaacaaatgtt

SEQ ID NO: 2647 - DNA, 20 bp, Artificial Sequence
  Synthetic
gcctgaccctcggccatcgc

SEQ ID NO: 2648 - DNA, 20 bp, Artificial Sequence
  Synthetic
tgttttattccttgcccgtc

SEQ ID NO: 2649 - DNA, 20 bp, Artificial Sequence
  Synthetic
ctcacatccagattcaccag

SEQ ID NO: 2650 - DNA, 20 bp, Artificial Sequence
  Synthetic
ctctcaggagatctgaacga

SEQ ID NO: 2651 - DNA, 20 bp, Artificial Sequence
  Synthetic
gaggacctctttttcaccaa

SEQ ID NO: 2652 - DNA, 20 bp, Artificial Sequence
  Synthetic
cttgaggcggccgggcccgg

SEQ ID NO: 2653 - DNA, 20 bp, Artificial Sequence
  Synthetic
gcaggtaggcgatggcctcg

SEQ ID NO: 2654 - DNA, 20 bp, Artificial Sequence
  Synthetic
gtctcatgcctgctcatggt

SEQ ID NO: 2655 - DNA, 20 bp, Artificial Sequence
  Synthetic
gtcctagccataccacctgc

SEQ ID NO: 2656 - DNA, 20 bp, Artificial Sequence
  Synthetic
cctgatgtcaaaggagaagc

SEQ ID NO: 2657 - DNA, 20 bp, Artificial Sequence
  Synthetic
gcgctccaggtgtgccgccg

SEQ ID NO: 2658 - DNA, 20 bp, Artificial Sequence
  Synthetic
ggcgcccttatgcattctcg

SEQ ID NO: 2659 - DNA, 20 bp, Artificial Sequence
  Synthetic
aaactacagcagcagcctgc

SEQ ID NO: 2660 - DNA, 20 bp, Artificial Sequence
  Synthetic
gtgttcatgcagctgaagta

SEQ ID NO: 2661 - DNA, 20 bp, Artificial Sequence
  Synthetic
cagctagattacatgcttcc

SEQ ID NO: 2662 - DNA, 20 bp, Artificial Sequence
  Synthetic
tccatacgtggcaggcgtgg

SEQ ID NO: 2663 - DNA, 20 bp, Artificial Sequence
  Synthetic
ggcagaaaggccaggagaga

SEQ ID NO: 2664 - DNA, 20 bp, Artificial Sequence
  Synthetic
agaagggctcctggtgagcg

SEQ ID NO: 2665 - DNA, 20 bp, Artificial Sequence
  Synthetic
catgcagttgaccgtataga

SEQ ID NO: 2666 - DNA, 20 bp, Artificial Sequence
  Synthetic
acactagaagactgtcagca

SEQ ID NO: 2667 - DNA, 20 bp, Artificial Sequence
  Synthetic
ggactagacatcttttaacc

SEQ ID NO: 2668 - DNA, 20 bp, Artificial Sequence
  Synthetic
gaatatccccccaacttcac

SEQ ID NO: 2669 - DNA, 20 bp, Artificial Sequence
  Synthetic
gtccacgggctacaccaaac

SEQ ID NO: 2670 - DNA, 20 bp, Artificial Sequence
  Synthetic
actgacgtgattggacttac

SEQ ID NO: 2671 - DNA, 20 bp, Artificial Sequence
  Synthetic
ttcttgatggaaagatggga

SEQ ID NO: 2672 - DNA, 20 bp, Artificial Sequence
  Synthetic
ggttgaccttgggattgagg

SEQ ID NO: 2673 - DNA, 20 bp, Artificial Sequence
  Synthetic
ctactgcagcttctgccagg

SEQ ID NO: 2674 - DNA, 20 bp, Artificial Sequence
  Synthetic
gccggagctcccaggagaga

SEQ ID NO: 2675 - DNA, 20 bp, Artificial Sequence
  Synthetic
cggcttccacctcaggctcg

SEQ ID NO: 2676 - DNA, 20 bp, Artificial Sequence
  Synthetic
tgcagttggcgtggctgagc

SEQ ID NO: 2677 - DNA, 20 bp, Artificial Sequence
  Synthetic
cacccacatccccctgcaga

SEQ ID NO: 2678 - DNA, 20 bp, Artificial Sequence
  Synthetic
tcctcagggtccctcctggc

SEQ ID NO: 2679 - DNA, 20 bp, Artificial Sequence
  Synthetic
gcccctgatccttgctgtgg

SEQ ID NO: 2680 - DNA, 20 bp, Artificial Sequence
  Synthetic
agcccctctagccatgccat

SEQ ID NO: 2681 - DNA, 20 bp, Artificial Sequence
  Synthetic
ccatgaccagtgcagctgtg

SEQ ID NO: 2682 - DNA, 20 bp, Artificial Sequence
  Synthetic
agagctagcattcagacctc

SEQ ID NO: 2683 - DNA, 20 bp, Artificial Sequence
  Synthetic
gctgcagcaacaacggtttt

SEQ ID NO: 2684 - DNA, 20 bp, Artificial Sequence
  Synthetic
gaccctactgctgttgctgc

SEQ ID NO: 2685 - DNA, 20 bp, Artificial Sequence
  Synthetic
cctgatccccaaggtgtcaa

SEQ ID NO: 2686 - DNA, 20 bp, Artificial Sequence
  Synthetic
caaccgcaagaagatgaccc

SEQ ID NO: 2687 - DNA, 20 bp, Artificial Sequence
  Synthetic
tgcccacaacctcctgacag

SEQ ID NO: 2688 - DNA, 20 bp, Artificial Sequence
  Synthetic
tgtgaccagctttcaggcag

SEQ ID NO: 2689 - DNA, 20 bp, Artificial Sequence
  Synthetic
cttagtctccacctggatgc

SEQ ID NO: 2690 - DNA, 20 bp, Artificial Sequence
  Synthetic
catctaacctggcagctgga

SEQ ID NO: 2691 - DNA, 20 bp, Artificial Sequence
  Synthetic
gaagaggctgatgatgctgg

SEQ ID NO: 2692 - DNA, 20 bp, Artificial Sequence
  Synthetic
tcacttccagaaaggcagca

SEQ ID NO: 2693 - DNA, 20 bp, Artificial Sequence
  Synthetic
acaccccggcctaagcagcg

SEQ ID NO: 2694 - DNA, 20 bp, Artificial Sequence
  Synthetic
cagccactgcttctggcctc

SEQ ID NO: 2695 - DNA, 20 bp, Artificial Sequence
  Synthetic
aatccatgtctgggcaggga

SEQ ID NO: 2696 - DNA, 20 bp, Artificial Sequence
  Synthetic
gatcagaccccctgggcttc

SEQ ID NO: 2697 - DNA, 20 bp, Artificial Sequence
  Synthetic
cgaggaccccagcgaccctc

SEQ ID NO: 2698 - DNA, 20 bp, Artificial Sequence
  Synthetic
atgcaagtgaaacggctacg

SEQ ID NO: 2699 - DNA, 20 bp, Artificial Sequence
  Synthetic
gaccgaggcgtgtctccagc

SEQ ID NO: 2700 - DNA, 20 bp, Artificial Sequence
  Synthetic
acgcctgtagtatgttatgc

SEQ ID NO: 2701 - DNA, 20 bp, Artificial Sequence
  Synthetic
gtggcagctaactttccttc

SEQ ID NO: 2702 - DNA, 20 bp, Artificial Sequence
  Synthetic
cctaggcagggggtggctcc

SEQ ID NO: 2703 - DNA, 20 bp, Artificial Sequence
  Synthetic
gctcaccttcgggatcagct

SEQ ID NO: 2704 - DNA, 20 bp, Artificial Sequence
  Synthetic
ccgtagtcctcctggtgctg

SEQ ID NO: 2705 - DNA, 20 bp, Artificial Sequence
  Synthetic
tgaacctactcatccacatt

SEQ ID NO: 2706 - DNA, 20 bp, Artificial Sequence
  Synthetic
cgggatcttgcaggaccacc

SEQ ID NO: 2707 - DNA, 20 bp, Artificial Sequence
  Synthetic
ggccatgcgggaaagagcag

SEQ ID NO: 2708 - DNA, 20 bp, Artificial Sequence
  Synthetic
cctccatgatgttgatgcca

SEQ ID NO: 2709 - DNA, 20 bp, Artificial Sequence
  Synthetic
tcaccacagtcaccctggcg

SEQ ID NO: 2710 - DNA, 20 bp, Artificial Sequence
  Synthetic
cacctgccaggccctgggcg

SEQ ID NO: 2711 - DNA, 20 bp, Artificial Sequence
  Synthetic
ccagatctccctggaactcc

SEQ ID NO: 2712 - DNA, 20 bp, Artificial Sequence
  Synthetic
cagggaacccaagggctaca

SEQ ID NO: 2713 - DNA, 20 bp, Artificial Sequence
  Synthetic
cggctagaagttcgagaagc

SEQ ID NO: 2714 - DNA, 20 bp, Artificial Sequence
  Synthetic
tttcctagatcacctccaac

SEQ ID NO: 2715 - DNA, 20 bp, Artificial Sequence
  Synthetic
tcctactctgggtcctcctc

SEQ ID NO: 2716 - DNA, 20 bp, Artificial Sequence
  Synthetic
tcagcctgctggcgggtacg

SEQ ID NO: 2717 - DNA, 20 bp, Artificial Sequence
  Synthetic
gggggatcagataggcctgg

SEQ ID NO: 2718 - DNA, 20 bp, Artificial Sequence
  Synthetic
gaggcaaagcacctctcgga

SEQ ID NO: 2719 - DNA, 20 bp, Artificial Sequence
  Synthetic
tatggagcgctcagcagctg

SEQ ID NO: 2720 - DNA, 20 bp, Artificial Sequence
  Synthetic
caagtcctcagaaatccatc

SEQ ID NO: 2721 - DNA, 20 bp, Artificial Sequence
  Synthetic
tgatgaaaacaatggtgctc

SEQ ID NO: 2722 - DNA, 20 bp, Artificial Sequence
  Synthetic
agcagcctcctgctctacaa

SEQ ID NO: 2723 - DNA, 20 bp, Artificial Sequence
  Synthetic
gggctcagtggcccacggtc

SEQ ID NO: 2724 - DNA, 20 bp, Artificial Sequence
  Synthetic
cacaggcagcttcaggaggc

SEQ ID NO: 2725 - DNA, 20 bp, Artificial Sequence
  Synthetic
cctgaatcagatggtcttcc

SEQ ID NO: 2726 - DNA, 20 bp, Artificial Sequence
  Synthetic
tggttcttgatgtccttagt

SEQ ID NO: 2727 - DNA, 20 bp, Artificial Sequence
  Synthetic
agagtatgctcctttctgcc

SEQ ID NO: 2728 - DNA, 20 bp, Artificial Sequence
  Synthetic
agctgcacagcaggggcagg

SEQ ID NO: 2729 - DNA, 20 bp, Artificial Sequence
  Synthetic
cgactcagccagcagcacca

SEQ ID NO: 2730 - DNA, 20 bp, Artificial Sequence
  Synthetic
taggagaagccctggccctc

SEQ ID NO: 2731 - DNA, 20 bp, Artificial Sequence
  Synthetic
tttcactagggttcacttga

SEQ ID NO: 2732 - DNA, 20 bp, Artificial Sequence
  Synthetic
caggtacacccagagaggca

SEQ ID NO: 2733 - DNA, 20 bp, Artificial Sequence
  Synthetic
tttcactgcgctcatcatga

SEQ ID NO: 2734 - DNA, 20 bp, Artificial Sequence
  Synthetic
aaactagagggctccatgat

SEQ ID NO: 2735 - DNA, 20 bp, Artificial Sequence
  Synthetic
cggtagcgctgtcagcggcg

SEQ ID NO: 2736 - DNA, 20 bp, Artificial Sequence
  Synthetic
tgttcctagccacctggggc

SEQ ID NO: 2737 - DNA, 20 bp, Artificial Sequence
  Synthetic
gctctgctagggggcgctgg

SEQ ID NO: 2738 - DNA, 20 bp, Artificial Sequence
  Synthetic
ctggagagtggtctctgtgc

SEQ ID NO: 2739 - DNA, 20 bp, Artificial Sequence
  Synthetic
atggcatggcgaaaaagtgg

SEQ ID NO: 2740 - DNA, 20 bp, Artificial Sequence
  Synthetic
tgtgctatgaagggggtgtg

SEQ ID NO: 2741 - DNA, 20 bp, Artificial Sequence
  Synthetic
cagcagccgggatgccggcg

SEQ ID NO: 2742 - DNA, 20 bp, Artificial Sequence
  Synthetic
ggagcatgaggtaatcagcc

SEQ ID NO: 2743 - DNA, 20 bp, Artificial Sequence
  Synthetic
cgcccaccgcagcagcttca

SEQ ID NO: 2744 - DNA, 20 bp, Artificial Sequence
  Synthetic
acactcatgtatcttcattc

SEQ ID NO: 2745 - DNA, 20 bp, Artificial Sequence
  Synthetic
cacagccagggctggaggtg

SEQ ID NO: 2746 - DNA, 20 bp, Artificial Sequence
  Synthetic
ctgtatggaggctccatcat

SEQ ID NO: 2747 - DNA, 20 bp, Artificial Sequence
  Synthetic
gcagtacctggccatgggct

SEQ ID NO: 2748 - DNA, 20 bp, Artificial Sequence
  Synthetic
ccccaccccggcaaggctgg

SEQ ID NO: 2749 - DNA, 20 bp, Artificial Sequence
  Synthetic
tagccctatgacttatcctg

SEQ ID NO: 2750 - DNA, 20 bp, Artificial Sequence
  Synthetic
tgagctgctagtcccagctg

SEQ ID NO: 2751 - DNA, 20 bp, Artificial Sequence
  Synthetic
cgttgagcacggtcccaaag

SEQ ID NO: 2752 - DNA, 20 bp, Artificial Sequence
  Synthetic
atcgacaggcgcattgtgga

SEQ ID NO: 2753 - DNA, 20 bp, Artificial Sequence
  Synthetic
cacctcagtctgcagctaca

SEQ ID NO: 2754 - DNA, 20 bp, Artificial Sequence
  Synthetic
cctgatcctcttggcattgc

SEQ ID NO: 2755 - DNA, 20 bp, Artificial Sequence
  Synthetic
tgctatttccggacctaaca

SEQ ID NO: 2756 - DNA, 20 bp, Artificial Sequence
  Synthetic
actccccacagaggtccagc

SEQ ID NO: 2757 - DNA, 20 bp, Artificial Sequence
  Synthetic
gacccctagctgccttggat

SEQ ID NO: 2758 - DNA, 20 bp, Artificial Sequence
  Synthetic
atccattcccgtacttcctt

SEQ ID NO: 2759 - DNA, 20 bp, Artificial Sequence
  Synthetic
tgccttgaccagtgccccag

SEQ ID NO: 2760 - DNA, 20 bp, Artificial Sequence
  Synthetic
tggcttaagggctgatgtgt

SEQ ID NO: 2761 - DNA, 20 bp, Artificial Sequence
  Synthetic
gaggctgagcagccacagga

SEQ ID NO: 2762 - DNA, 20 bp, Artificial Sequence
  Synthetic
cctgaatccaaaggagagca

SEQ ID NO: 2763 - DNA, 20 bp, Artificial Sequence
  Synthetic
gatctacccgccctgaggcc

SEQ ID NO: 2764 - DNA, 20 bp, Artificial Sequence
  Synthetic
gccaggttgccaggactgcg

SEQ ID NO: 2765 - DNA, 20 bp, Artificial Sequence
  Synthetic
tgcccaccgactccatacct

SEQ ID NO: 2766 - DNA, 20 bp, Artificial Sequence
  Synthetic
gatcgcagcccgccaggtcc

SEQ ID NO: 2767 - DNA, 20 bp, Artificial Sequence
  Synthetic
gtccagggaggctgcgcctc

SEQ ID NO: 2768 - DNA, 20 bp, Artificial Sequence
  Synthetic
gcgcatggccgtggaggagg

SEQ ID NO: 2769 - DNA, 20 bp, Artificial Sequence
  Synthetic
cctgattccctgaggaccag

SEQ ID NO: 2770 - DNA, 20 bp, Artificial Sequence
  Synthetic
cactcacttcttcagggcag

SEQ ID NO: 2771 - DNA, 20 bp, Artificial Sequence
  Synthetic
cccagttctcctggccagaa

SEQ ID NO: 2772 - DNA, 20 bp, Artificial Sequence
  Synthetic
ctggatcatcttctcgcggt

SEQ ID NO: 2773 - DNA, 20 bp, Artificial Sequence
  Synthetic
gatatggggcccaggatgac

SEQ ID NO: 2774 - DNA, 20 bp, Artificial Sequence
  Synthetic
gcacgtggcctcgtagccca

SEQ ID NO: 2775 - DNA, 20 bp, Artificial Sequence
  Synthetic
tagccaggagcacgatctgt

SEQ ID NO: 2776 - DNA, 20 bp, Artificial Sequence
  Synthetic
tccaccgaccacctccagcc

SEQ ID NO: 2777 - DNA, 20 bp, Artificial Sequence
  Synthetic
tatctaagcccggtagccac

SEQ ID NO: 2778 - DNA, 20 bp, Artificial Sequence
  Synthetic
aaagagcctaagggtgaaaa

SEQ ID NO: 2779 - DNA, 20 bp, Artificial Sequence
  Synthetic
tgtgcagtcgaacagcatga

SEQ ID NO: 2780 - DNA, 20 bp, Artificial Sequence
  Synthetic
cgtctacaagtgagcggccc

SEQ ID NO: 2781 - DNA, 20 bp, Artificial Sequence
  Synthetic
agccctactgcaccagggcc

SEQ ID NO: 2782 - DNA, 20 bp, Artificial Sequence
  Synthetic
taggccctagggtggctctg

SEQ ID NO: 2783 - DNA, 20 bp, Artificial Sequence
  Synthetic
cagcgtgaaggctactgctc

SEQ ID NO: 2784 - DNA, 20 bp, Artificial Sequence
  Synthetic
cctgagccacctggtgctgc

SEQ ID NO: 2785 - DNA, 20 bp, Artificial Sequence
  Synthetic
cgtgatttccctggagacgc

SEQ ID NO: 2786 - DNA, 20 bp, Artificial Sequence
  Synthetic
atccatgcccgtcaggtagt

SEQ ID NO: 2787 - DNA, 20 bp, Artificial Sequence
  Synthetic
gtttcatgcctgctcatggc

SEQ ID NO: 2788 - DNA, 20 bp, Artificial Sequence
  Synthetic
tgcgctagaccagggggttc

SEQ ID NO: 2789 - DNA, 20 bp, Artificial Sequence
  Synthetic
gagttaggtgccaaaacttg

SEQ ID NO: 2790 - DNA, 20 bp, Artificial Sequence
  Synthetic
cgtagtgaccaaggtccagt

SEQ ID NO: 2791 - DNA, 20 bp, Artificial Sequence
  Synthetic
tctagctctcagcctgctac

SEQ ID NO: 2792 - DNA, 20 bp, Artificial Sequence
  Synthetic
tcgctaaagacctatttcta

SEQ ID NO: 2793 - DNA, 20 bp, Artificial Sequence
  Synthetic
cactcagaaccttaggcatt

SEQ ID NO: 2794 - DNA, 20 bp, Artificial Sequence
  Synthetic
cctgatgctgctggacggac

SEQ ID NO: 2795 - DNA, 20 bp, Artificial Sequence
  Synthetic
agcctaggccaggagaccta

SEQ ID NO: 2796 - DNA, 20 bp, Artificial Sequence
  Synthetic
gagagtaggcaaatgacctg

SEQ ID NO: 2797 - DNA, 20 bp, Artificial Sequence
  Synthetic
cgtagtcctcgtggtgacca

SEQ ID NO: 2798 - DNA, 20 bp, Artificial Sequence
  Synthetic
ccagcctaggtgaacatgta

SEQ ID NO: 2799 - DNA, 20 bp, Artificial Sequence
  Synthetic
ttcatagacggccacctaga

SEQ ID NO: 2800 - DNA, 20 bp, Artificial Sequence
  Synthetic
agcttctatgtgtcctcttt

SEQ ID NO: 2801 - DNA, 20 bp, Artificial Sequence
  Synthetic
gaggctcactcctctgtgat

SEQ ID NO: 2802 - DNA, 20 bp, Artificial Sequence
  Synthetic
cctgatctgcaaggaatgcc

SEQ ID NO: 2803 - DNA, 20 bp, Artificial Sequence
  Synthetic
cctagggggaggacgaggag

SEQ ID NO: 2804 - DNA, 20 bp, Artificial Sequence
  Synthetic
cggaatgctgagcggtgtgg

SEQ ID NO: 2805 - DNA, 20 bp, Artificial Sequence
  Synthetic
cttccctatctctacagccc

SEQ ID NO: 2806 - DNA, 20 bp, Artificial Sequence
  Synthetic
gtccagtccccaggaggaaa

SEQ ID NO: 2807 - DNA, 20 bp, Artificial Sequence
  Synthetic
cagccaccagtcataggggg

SEQ ID NO: 2808 - DNA, 20 bp, Artificial Sequence
  Synthetic
tggtgttaggtaaatccggg

SEQ ID NO: 2809 - DNA, 20 bp, Artificial Sequence
  Synthetic
ctccagagtgcataaatcag

SEQ ID NO: 2810 - DNA, 20 bp, Artificial Sequence
  Synthetic
aggttagccgtcagcaccct

SEQ ID NO: 2811 - DNA, 20 bp, Artificial Sequence
  Synthetic
tgaggctgcgcgggcccttg

SEQ ID NO: 2812 - DNA, 20 bp, Artificial Sequence
  Synthetic
gatctaggcatcaataatca

SEQ ID NO: 2813 - DNA, 20 bp, Artificial Sequence
  Synthetic
acgggcccaggggcgcggac

SEQ ID NO: 2814 - DNA, 20 bp, Artificial Sequence
  Synthetic
aaagtgtagatctatcccga

SEQ ID NO: 2815 - DNA, 20 bp, Artificial Sequence
  Synthetic
cagatgctgggagtcctgcc

SEQ ID NO: 2816 - DNA, 20 bp, Artificial Sequence
  Synthetic
ctctcagctctgccttggtc

SEQ ID NO: 2817 - DNA, 20 bp, Artificial Sequence
  Synthetic
tgacctcacctgggtgttcg

SEQ ID NO: 2818 - DNA, 20 bp, Artificial Sequence
  Synthetic
ggcctattccacctgtcccc

SEQ ID NO: 2819 - DNA, 20 bp, Artificial Sequence
  Synthetic
gtatcagacagatgaagtag

SEQ ID NO: 2820 - DNA, 20 bp, Artificial Sequence
  Synthetic
ggagcacctggccaagctgc

SEQ ID NO: 2821 - DNA, 20 bp, Artificial Sequence
  Synthetic
cgctcgtactccgtgcccga

SEQ ID NO: 2822 - DNA, 20 bp, Artificial Sequence
  Synthetic
ctcacttgccggccttgatc

SEQ ID NO: 2823 - DNA, 20 bp, Artificial Sequence
  Synthetic
tggctccagtatcgtcaaca

SEQ ID NO: 2824 - DNA, 20 bp, Artificial Sequence
  Synthetic
cccagacctgccaggctgca

SEQ ID NO: 2825 - DNA, 20 bp, Artificial Sequence
  Synthetic
aaggcccagctcaacagtca

SEQ ID NO: 2826 - DNA, 20 bp, Artificial Sequence
  Synthetic
actagtcctattggtcctcc

SEQ ID NO: 2827 - DNA, 20 bp, Artificial Sequence
  Synthetic
ggatccgcacgggccgggtc

SEQ ID NO: 2828 - DNA, 20 bp, Artificial Sequence
  Synthetic
ctggcagcaggtatcacaca

SEQ ID NO: 2829 - DNA, 20 bp, Artificial Sequence
  Synthetic
ccgggacgaccccggctttg

SEQ ID NO: 2830 - DNA, 20 bp, Artificial Sequence
  Synthetic
agctgacccgcagggtgatc

SEQ ID NO: 2831 - DNA, 20 bp, Artificial Sequence
  Synthetic
actttacagatcagaggtgg

SEQ ID NO: 2832 - DNA, 20 bp, Artificial Sequence
  Synthetic
cctgactggacagccaccac

SEQ ID NO: 2833 - DNA, 20 bp, Artificial Sequence
  Synthetic
aagaggcatccatttcaggt

SEQ ID NO: 2834 - DNA, 20 bp, Artificial Sequence
  Synthetic
catagtgagtttggtctccc

SEQ ID NO: 2835 - DNA, 20 bp, Artificial Sequence
  Synthetic
cagagctaacacagtctgaa

SEQ ID NO: 2836 - DNA, 20 bp, Artificial Sequence
  Synthetic
agcatgagctctgccttctc

SEQ ID NO: 2837 - DNA, 20 bp, Artificial Sequence
  Synthetic
caaccaccgggacgtacggc

SEQ ID NO: 2838 - DNA, 20 bp, Artificial Sequence
  Synthetic
aatgcagtccccaaggaggt

SEQ ID NO: 2839 - DNA, 20 bp, Artificial Sequence
  Synthetic
tgtttagctggaaacagacc

SEQ ID NO: 2840 - DNA, 20 bp, Artificial Sequence
  Synthetic
ctctgcaggaaaaatggtgg

SEQ ID NO: 2841 - DNA, 20 bp, Artificial Sequence
  Synthetic
aatgaggaagctggatctgc

SEQ ID NO: 2842 - DNA, 20 bp, Artificial Sequence
  Synthetic
tcctcagtcttcctcattca

SEQ ID NO: 2843 - DNA, 20 bp, Artificial Sequence
  Synthetic
ggccggtcagtcagtcttac

SEQ ID NO: 2844 - DNA, 20 bp, Artificial Sequence
  Synthetic
ggtaggctagctcgccgctt

SEQ ID NO: 2845 - DNA, 20 bp, Artificial Sequence
  Synthetic
ggctactgctgctgcggcgg

SEQ ID NO: 2846 - DNA, 20 bp, Artificial Sequence
  Synthetic
aaacaaggggatgcctgtga

SEQ ID NO: 2847 - DNA, 20 bp, Artificial Sequence
  Synthetic
gtgaccatggcctgcgagga

SEQ ID NO: 2848 - DNA, 20 bp, Artificial Sequence
  Synthetic
gtctcaggcgtccctccaag

SEQ ID NO: 2849 - DNA, 20 bp, Artificial Sequence
  Synthetic
cgactgtgcgtggcgagcag

SEQ ID NO: 2850 - DNA, 20 bp, Artificial Sequence
  Synthetic
cgagggctgtggacgccctg

SEQ ID NO: 2851 - DNA, 20 bp, Artificial Sequence
  Synthetic
ggccttctgagcagaatgga

SEQ ID NO: 2852 - DNA, 20 bp, Artificial Sequence
  Synthetic
ccagatcccattggaccacc

SEQ ID NO: 2853 - DNA, 20 bp, Artificial Sequence
  Synthetic
cattggcctattcccggcgc

SEQ ID NO: 2854 - DNA, 20 bp, Artificial Sequence
  Synthetic
ccgcgtcaggtgccagcaca

SEQ ID NO: 2855 - DNA, 20 bp, Artificial Sequence
  Synthetic
cagctaggcagccacgtaga

SEQ ID NO: 2856 - DNA, 20 bp, Artificial Sequence
  Synthetic
atgtgatgatgtccaccgcg

SEQ ID NO: 2857 - DNA, 20 bp, Artificial Sequence
  Synthetic
agtcatctctctgtgcagtt

SEQ ID NO: 2858 - DNA, 20 bp, Artificial Sequence
  Synthetic
gtctcatccaggggaacctt

SEQ ID NO: 2859 - DNA, 20 bp, Artificial Sequence
  Synthetic
gcgtaggagcagtcaagaga

SEQ ID NO: 2860 - DNA, 20 bp, Artificial Sequence
  Synthetic
agactaatgcctcatttgtt

SEQ ID NO: 2861 - DNA, 20 bp, Artificial Sequence
  Synthetic
agagatggagctggtccccc

SEQ ID NO: 2862 - DNA, 20 bp, Artificial Sequence
  Synthetic
ggctaacccatctctcctcg

SEQ ID NO: 2863 - DNA, 20 bp, Artificial Sequence
  Synthetic
aacgatctcagtggagaacg

SEQ ID NO: 2864 - DNA, 20 bp, Artificial Sequence
  Synthetic
ccctcagggcaggctgagcg

SEQ ID NO: 2865 - DNA, 20 bp, Artificial Sequence
  Synthetic
gcctgcccatctgctgaacc

SEQ ID NO: 2866 - DNA, 20 bp, Artificial Sequence
  Synthetic
caatcattgggcaggtggag

SEQ ID NO: 2867 - DNA, 20 bp, Artificial Sequence
  Synthetic
cctagaaagccaggcctccc

SEQ ID NO: 2868 - DNA, 20 bp, Artificial Sequence
  Synthetic
gcactacttggcaacctcct

SEQ ID NO: 2869 - DNA, 20 bp, Artificial Sequence
  Synthetic
aaggctagtggagacctggg

SEQ ID NO: 2870 - DNA, 20 bp, Artificial Sequence
  Synthetic
agattcattggtgccgaggg

SEQ ID NO: 2871 - DNA, 20 bp, Artificial Sequence
  Synthetic
ggcaacggcggcagtgggcg

SEQ ID NO: 2872 - DNA, 20 bp, Artificial Sequence
  Synthetic
ctttgaccggtaagtaggag

SEQ ID NO: 2873 - DNA, 20 bp, Artificial Sequence
  Synthetic
cctcacaggccacgctctcc

SEQ ID NO: 2874 - DNA, 20 bp, Artificial Sequence
  Synthetic
caagaaatgcctggagaaag

SEQ ID NO: 2875 - DNA, 20 bp, Artificial Sequence
  Synthetic
cctaactaacactggatccc

SEQ ID NO: 2876 - DNA, 20 bp, Artificial Sequence
  Synthetic
tctttatcttcctccagtgc

SEQ ID NO: 2877 - DNA, 20 bp, Artificial Sequence
  Synthetic
gccagccctcctggggcccg

SEQ ID NO: 2878 - DNA, 20 bp, Artificial Sequence
  Synthetic
tggcaggcagcggcagttgt

SEQ ID NO: 2879 - DNA, 20 bp, Artificial Sequence
  Synthetic
aacgatgataaaggtcatgc

SEQ ID NO: 2880 - DNA, 20 bp, Artificial Sequence
  Synthetic
catgtctatcaagtcagaac

SEQ ID NO: 2881 - DNA, 20 bp, Artificial Sequence
  Synthetic
ggactagattctcagagctc

SEQ ID NO: 2882 - DNA, 20 bp, Artificial Sequence
  Synthetic
attcagcggggcacgacaaa

SEQ ID NO: 2883 - DNA, 20 bp, Artificial Sequence
  Synthetic
cctccaagtgtaagcggtgg

SEQ ID NO: 2884 - DNA, 20 bp, Artificial Sequence
  Synthetic
gacgcactgcagctcggcct

SEQ ID NO: 2885 - DNA, 20 bp, Artificial Sequence
  Synthetic
aagccaccttgttgttagga

SEQ ID NO: 2886 - DNA, 20 bp, Artificial Sequence
  Synthetic
aagttcaactctggtttaaa

SEQ ID NO: 2887 - DNA, 20 bp, Artificial Sequence
  Synthetic
cctagccctctgccagattt

SEQ ID NO: 2888 - DNA, 20 bp, Artificial Sequence
  Synthetic
gagcattcctccttgttatc

SEQ ID NO: 2889 - DNA, 20 bp, Artificial Sequence
  Synthetic
agggcctctacagtggcgta

SEQ ID NO: 2890 - DNA, 20 bp, Artificial Sequence
  Synthetic
cctgatcctgtcggtccagc

SEQ ID NO: 2891 - DNA, 20 bp, Artificial Sequence
  Synthetic
gcagctgcaggctgcgcacc

SEQ ID NO: 2892 - DNA, 20 bp, Artificial Sequence
  Synthetic
gctaggggctgaagtccctc

SEQ ID NO: 2893 - DNA, 20 bp, Artificial Sequence
  Synthetic
gagctagaagatcctcgcca

SEQ ID NO: 2894 - DNA, 20 bp, Artificial Sequence
  Synthetic
agagcatttcttgaatccag

SEQ ID NO: 2895 - DNA, 20 bp, Artificial Sequence
  Synthetic
ggcccagaccccatagccaa

SEQ ID NO: 2896 - DNA, 20 bp, Artificial Sequence
  Synthetic
gggacagccgcctgaccagc

SEQ ID NO: 2897 - DNA, 20 bp, Artificial Sequence
  Synthetic
agacatacctcttgtccttg

SEQ ID NO: 2898 - DNA, 20 bp, Artificial Sequence
  Synthetic
caggcgagcagcatggtgtc

SEQ ID NO: 2899 - DNA, 20 bp, Artificial Sequence
  Synthetic
tgacacccacaacatgtcag

SEQ ID NO: 2900 - DNA, 20 bp, Artificial Sequence
  Synthetic
aagtgttaaagaggctttgc

SEQ ID NO: 2901 - DNA, 20 bp, Artificial Sequence
  Synthetic
ggcctgagtgcgggcgcggg

SEQ ID NO: 2902 - DNA, 20 bp, Artificial Sequence
  Synthetic
gcggctatgctgggagcatg

SEQ ID NO: 2903 - DNA, 20 bp, Artificial Sequence
  Synthetic
gctgatcctgctggtcctgc

SEQ ID NO: 2904 - DNA, 20 bp, Artificial Sequence
  Synthetic
ccacatatttgtgctggagc

SEQ ID NO: 2905 - DNA, 20 bp, Artificial Sequence
  Synthetic
cccccagagagagagtggtg

SEQ ID NO: 2906 - DNA, 20 bp, Artificial Sequence
  Synthetic
gaggtatgtctccagcaggt

SEQ ID NO: 2907 - DNA, 20 bp, Artificial Sequence
  Synthetic
caagatgcgtgctctggagg

SEQ ID NO: 2908 - DNA, 20 bp, Artificial Sequence
  Synthetic
tgcgaacttttcaccaccat

SEQ ID NO: 2909 - DNA, 20 bp, Artificial Sequence
  Synthetic
gctagtgctcccggtcctgc

SEQ ID NO: 2910 - DNA, 20 bp, Artificial Sequence
  Synthetic
tggtagctggacaacaaaaa

SEQ ID NO: 2911 - DNA, 20 bp, Artificial Sequence
  Synthetic
ccatcagtgacggcctgggt

SEQ ID NO: 2912 - DNA, 20 bp, Artificial Sequence
  Synthetic
gtctcatgcctgctcgtggt

SEQ ID NO: 2913 - DNA, 20 bp, Artificial Sequence
  Synthetic
ggcttcatgcccatgtatgt

SEQ ID NO: 2914 - DNA, 20 bp, Artificial Sequence
  Synthetic
ctcacggccctggcagtcct

SEQ ID NO: 2915 - DNA, 20 bp, Artificial Sequence
  Synthetic
ctggctagaggcgaggcttc

SEQ ID NO: 2916 - DNA, 20 bp, Artificial Sequence
  Synthetic
gatgatcccccaggtcgcga

SEQ ID NO: 2917 - DNA, 20 bp, Artificial Sequence
  Synthetic
cctcaggggccaacaggtcc

SEQ ID NO: 2918 - DNA, 20 bp, Artificial Sequence
  Synthetic
cggctacagatgccattgag

SEQ ID NO: 2919 - DNA, 20 bp, Artificial Sequence
  Synthetic
gaaatggttctccttgcttg

SEQ ID NO: 2920 - DNA, 20 bp, Artificial Sequence
  Synthetic
gtaccttcagcttggaagtc

SEQ ID NO: 2921 - DNA, 20 bp, Artificial Sequence
  Synthetic
gctgcaggtccccccggccc

SEQ ID NO: 2922 - DNA, 20 bp, Artificial Sequence
  Synthetic
catgatgatcaaggtgctcc

SEQ ID NO: 2923 - DNA, 20 bp, Artificial Sequence
  Synthetic
ccctgaccctcagggtgtca

SEQ ID NO: 2924 - DNA, 20 bp, Artificial Sequence
  Synthetic
gcctatctcctgggttcccg

SEQ ID NO: 2925 - DNA, 20 bp, Artificial Sequence
  Synthetic
atggagagattgatcctaaa

SEQ ID NO: 2926 - DNA, 20 bp, Artificial Sequence
  Synthetic
agtctaggagaatttactac

SEQ ID NO: 2927 - DNA, 20 bp, Artificial Sequence
  Synthetic
atcccttaaaaagcatttcc

SEQ ID NO: 2928 - DNA, 20 bp, Artificial Sequence
  Synthetic
cgcagtcccccaggtgagag

SEQ ID NO: 2929 - DNA, 20 bp, Artificial Sequence
  Synthetic
gtctcatgcctgcttgtggt

SEQ ID NO: 2930 - DNA, 20 bp, Artificial Sequence
  Synthetic
tgggctattgggggcccaga

SEQ ID NO: 2931 - DNA, 20 bp, Artificial Sequence
  Synthetic
tggctatgccaccagtagca

SEQ ID NO: 2932 - DNA, 20 bp, Artificial Sequence
  Synthetic
cctggtgactgtgcgttctg

SEQ ID NO: 2933 - DNA, 20 bp, Artificial Sequence
  Synthetic
caccaccgtgctgggcaatc

SEQ ID NO: 2934 - DNA, 20 bp, Artificial Sequence
  Synthetic
tatctagcggaaggcctctg

SEQ ID NO: 2935 - DNA, 20 bp, Artificial Sequence
  Synthetic
aagagacgagccagcgcaag

SEQ ID NO: 2936 - DNA, 20 bp, Artificial Sequence
  Synthetic
cctgaacctcctggtgcccc

SEQ ID NO: 2937 - DNA, 20 bp, Artificial Sequence
  Synthetic
aatgatgctcctggactgcg

SEQ ID NO: 2938 - DNA, 20 bp, Artificial Sequence
  Synthetic
tgaacctactccacgcccac

SEQ ID NO: 2939 - DNA, 20 bp, Artificial Sequence
  Synthetic
cctgctagtcctagggtagg

SEQ ID NO: 2940 - DNA, 20 bp, Artificial Sequence
  Synthetic
ttcaggagcttcagttgttc

SEQ ID NO: 2941 - DNA, 20 bp, Artificial Sequence
  Synthetic
ctgctatctgcttgcattcg

SEQ ID NO: 2942 - DNA, 20 bp, Artificial Sequence
  Synthetic
tcctaccgctcactcggcag

SEQ ID NO: 2943 - DNA, 20 bp, Artificial Sequence
  Synthetic
ctgactccagctgtcgtcac

SEQ ID NO: 2944 - DNA, 20 bp, Artificial Sequence
  Synthetic
cctgaaaagcctggtattcc

SEQ ID NO: 2945 - DNA, 20 bp, Artificial Sequence
  Synthetic
acctgatcctcatggccccg

SEQ ID NO: 2946 - DNA, 20 bp, Artificial Sequence
  Synthetic
gatcacctctcagagtcctc

SEQ ID NO: 2947 - DNA, 20 bp, Artificial Sequence
  Synthetic
actccatgacagtgtaattt

SEQ ID NO: 2948 - DNA, 20 bp, Artificial Sequence
  Synthetic
ctgctagtccagggggctgg

SEQ ID NO: 2949 - DNA, 20 bp, Artificial Sequence
  Synthetic
ctgccagactgcatccaggc

SEQ ID NO: 2950 - DNA, 20 bp, Artificial Sequence
  Synthetic
tctaggagcctctgtttact

SEQ ID NO: 2951 - DNA, 20 bp, Artificial Sequence
  Synthetic
gtgttccaacctgagaatgc

SEQ ID NO: 2952 - DNA, 20 bp, Artificial Sequence
  Synthetic
cgagatatgatgaaggagat

SEQ ID NO: 2953 - DNA, 20 bp, Artificial Sequence
  Synthetic
acaagccccgttggagctgc

SEQ ID NO: 2954 - DNA, 20 bp, Artificial Sequence
  Synthetic
gtcccagaaggaggcccagc

SEQ ID NO: 2955 - DNA, 20 bp, Artificial Sequence
  Synthetic
ggcctcgagtcagttcgagt

SEQ ID NO: 2956 - DNA, 20 bp, Artificial Sequence
  Synthetic
ccaaaggctacatttcatga

SEQ ID NO: 2957 - DNA, 20 bp, Artificial Sequence
  Synthetic
ttatccgggagccccctgta

SEQ ID NO: 2958 - DNA, 20 bp, Artificial Sequence
  Synthetic
ttaaggagcactggaaccgg

SEQ ID NO: 2959 - DNA, 20 bp, Artificial Sequence
  Synthetic
ctacagtcccctcatccagc

SEQ ID NO: 2960 - DNA, 20 bp, Artificial Sequence
  Synthetic
cggcgttgcactggcacact

SEQ ID NO: 2961 - DNA, 20 bp, Artificial Sequence
  Synthetic
cgggcacattgtggagggct

SEQ ID NO: 2962 - DNA, 20 bp, Artificial Sequence
  Synthetic
tgacgtcgtggtgagcagct

SEQ ID NO: 2963 - DNA, 20 bp, Artificial Sequence
  Synthetic
gattcccagttatgtccaat

SEQ ID NO: 2964 - DNA, 20 bp, Artificial Sequence
  Synthetic
tggtgggaacatctggtgga

SEQ ID NO: 2965 - DNA, 20 bp, Artificial Sequence
  Synthetic
ttcatccaagtaatggcatc

SEQ ID NO: 2966 - DNA, 20 bp, Artificial Sequence
  Synthetic
gcggggagtggctgggggac

SEQ ID NO: 2967 - DNA, 20 bp, Artificial Sequence
  Synthetic
gatgaacgcgatgtagctat

SEQ ID NO: 2968 - DNA, 20 bp, Artificial Sequence
  Synthetic
agaagggctccgggtgagaa

SEQ ID NO: 2969 - DNA, 20 bp, Artificial Sequence
  Synthetic
ctagctggactccggacctg

SEQ ID NO: 2970 - DNA, 20 bp, Artificial Sequence
  Synthetic
agagggggctgcagggccag

SEQ ID NO: 2971 - DNA, 20 bp, Artificial Sequence
  Synthetic
gctcgcccacctgctggccc

SEQ ID NO: 2972 - DNA, 20 bp, Artificial Sequence
  Synthetic
aaggattagccccacagatg

SEQ ID NO: 2973 - DNA, 20 bp, Artificial Sequence
  Synthetic
caaggacaacactgatcgcc

SEQ ID NO: 2974 - DNA, 20 bp, Artificial Sequence
  Synthetic
aagtagatgctgctgtcaga

SEQ ID NO: 2975 - DNA, 20 bp, Artificial Sequence
  Synthetic
tcccactagatctccttcct

SEQ ID NO: 2976 - DNA, 20 bp, Artificial Sequence
  Synthetic
gcattctccaggaaagccga

SEQ ID NO: 2977 - DNA, 20 bp, Artificial Sequence
  Synthetic
ttctgccaatgtgaaattaa

SEQ ID NO: 2978 - DNA, 20 bp, Artificial Sequence
  Synthetic
ggcaagggtcttctacatgt

SEQ ID NO: 2979 - DNA, 20 bp, Artificial Sequence
  Synthetic
cgccaggtatttcggggtgc

SEQ ID NO: 2980 - DNA, 20 bp, Artificial Sequence
  Synthetic
agctgaacatggtgcagaac

SEQ ID NO: 2981 - DNA, 20 bp, Artificial Sequence
  Synthetic
gggctacaagtcaccaccgt

SEQ ID NO: 2982 - DNA, 20 bp, Artificial Sequence
  Synthetic
gagctgtcacacatccagat

SEQ ID NO: 2983 - DNA, 20 bp, Artificial Sequence
  Synthetic
tccagtcagtaaagagtaga

SEQ ID NO: 2984 - DNA, 20 bp, Artificial Sequence
  Synthetic
acagagctagccgccccagt

SEQ ID NO: 2985 - DNA, 20 bp, Artificial Sequence
  Synthetic
gccccgccattctccacgat

SEQ ID NO: 2986 - DNA, 20 bp, Artificial Sequence
  Synthetic
atgaggcctccagggcttcc

SEQ ID NO: 2987 - DNA, 20 bp, Artificial Sequence
  Synthetic
aaggacgaccgtggagaccc

SEQ ID NO: 2988 - DNA, 20 bp, Artificial Sequence
  Synthetic
gcatgtcccaaaatatattt

SEQ ID NO: 2989 - DNA, 20 bp, Artificial Sequence
  Synthetic
gttacgtgacaaaattctgc

SEQ ID NO: 2990 - DNA, 20 bp, Artificial Sequence
  Synthetic
tgaccgactacagcaggtgc

SEQ ID NO: 2991 - DNA, 20 bp, Artificial Sequence
  Synthetic
ccttgggcatggtgtgcggg

SEQ ID NO: 2992 - DNA, 20 bp, Artificial Sequence
  Synthetic
gtctctgtagatgattgact

SEQ ID NO: 2993 - DNA, 20 bp, Artificial Sequence
  Synthetic
gaagagtacagaaagagaga

SEQ ID NO: 2994 - DNA, 20 bp, Artificial Sequence
  Synthetic
gggtaagggcatgacgctga

SEQ ID NO: 2995 - DNA, 20 bp, Artificial Sequence
  Synthetic
gcgtccagccctgcacgttc

SEQ ID NO: 2996 - DNA, 20 bp, Artificial Sequence
  Synthetic
cgagccgcccagcgagctca

SEQ ID NO: 2997 - DNA, 20 bp, Artificial Sequence
  Synthetic
gttgaagaagcacttgatct

SEQ ID NO: 2998 - DNA, 20 bp, Artificial Sequence
  Synthetic
ctagctgggactgagagacc

SEQ ID NO: 2999 - DNA, 20 bp, Artificial Sequence
  Synthetic
aaaagagagccgtggggaga

SEQ ID NO: 3000 - DNA, 20 bp, Artificial Sequence
  Synthetic
ctctttcagcccaggccctc

SEQ ID NO: 3001 - DNA, 20 bp, Artificial Sequence
  Synthetic
cgggataatgacggtgctcg

SEQ ID NO: 3002 - DNA, 20 bp, Artificial Sequence
  Synthetic
ggttccactagtagtgctgg

SEQ ID NO: 3003 - DNA, 20 bp, Artificial Sequence
  Synthetic
gtttcctcagacagcaggtg

SEQ ID NO: 3004 - DNA, 20 bp, Artificial Sequence
  Synthetic
ccttacatgccctggtaagt

SEQ ID NO: 3005 - DNA, 20 bp, Artificial Sequence
  Synthetic
ggccagctagtcgcgttcgg

SEQ ID NO: 3006 - DNA, 20 bp, Artificial Sequence
  Synthetic
cgcttcctgatgctgggccc

SEQ ID NO: 3007 - DNA, 20 bp, Artificial Sequence
  Synthetic
cctcaattctagaaaggcag

SEQ ID NO: 3008 - DNA, 20 bp, Artificial Sequence
  Synthetic
ccgggagcacacggaggagc

SEQ ID NO: 3009 - DNA, 20 bp, Artificial Sequence
  Synthetic
cctgacatgatactgcttcc

SEQ ID NO: 3010 - DNA, 20 bp, Artificial Sequence
  Synthetic
ctactcccacaacaaggctc

SEQ ID NO: 3011 - DNA, 20 bp, Artificial Sequence
  Synthetic
ctcaaggaccctcttgtccg

SEQ ID NO: 3012 - DNA, 20 bp, Artificial Sequence
  Synthetic
atcagcctttaccaacttgc

SEQ ID NO: 3013 - DNA, 20 bp, Artificial Sequence
  Synthetic
cctgaagcccccggaccacc

SEQ ID NO: 3014 - DNA, 20 bp, Artificial Sequence
  Synthetic
gtatttactgagttccccac

SEQ ID NO: 3015 - DNA, 20 bp, Artificial Sequence
  Synthetic
tgcatgctagctgcacatat

SEQ ID NO: 3016 - DNA, 20 bp, Artificial Sequence
  Synthetic
ggagggcaaggagtgcaggt

SEQ ID NO: 3017 - DNA, 20 bp, Artificial Sequence
  Synthetic
tccaatatgctgagaggcat

SEQ ID NO: 3018 - DNA, 20 bp, Artificial Sequence
  Synthetic
cagcaaggtggccacacaga

SEQ ID NO: 3019 - DNA, 20 bp, Artificial Sequence
  Synthetic
gtaagtgcagttggtccccc

SEQ ID NO: 3020 - DNA, 20 bp, Artificial Sequence
  Synthetic
atcactgttcaatttcctgt

SEQ ID NO: 3021 - DNA, 20 bp, Artificial Sequence
  Synthetic
ggaagtgcacacctgacagg

SEQ ID NO: 3022 - DNA, 20 bp, Artificial Sequence
  Synthetic
caaagtcctcctggtcccag

SEQ ID NO: 3023 - DNA, 20 bp, Artificial Sequence
  Synthetic
tccaagaggcaaatttccag

SEQ ID NO: 3024 - DNA, 20 bp, Artificial Sequence
  Synthetic
actgacaccctatatcccca

SEQ ID NO: 3025 - DNA, 20 bp, Artificial Sequence
  Synthetic
cgatgcactacagcagggcc

SEQ ID NO: 3026 - DNA, 20 bp, Artificial Sequence
  Synthetic
ctcaataggcacgagcagac

SEQ ID NO: 3027 - DNA, 20 bp, Artificial Sequence
  Synthetic
gtgcaacatggctcgcattg

SEQ ID NO: 3028 - DNA, 20 bp, Artificial Sequence
  Synthetic
cgggtacaggagggctctgg

SEQ ID NO: 3029 - DNA, 20 bp, Artificial Sequence
  Synthetic
gatcctcaccagggaggagg

SEQ ID NO: 3030 - DNA, 20 bp, Artificial Sequence
  Synthetic
cagcagcctagatcattgcc

SEQ ID NO: 3031 - DNA, 20 bp, Artificial Sequence
  Synthetic
gcaggcctccggaatcaccc

SEQ ID NO: 3032 - DNA, 20 bp, Artificial Sequence
  Synthetic
ggactgcaaaaccaaaccaa

SEQ ID NO: 3033 - DNA, 20 bp, Artificial Sequence
  Synthetic
ctcaaggccgccgtctgcgc

SEQ ID NO: 3034 - DNA, 20 bp, Artificial Sequence
  Synthetic
cccacctcatgatcgttctg

SEQ ID NO: 3035 - DNA, 20 bp, Artificial Sequence
  Synthetic
atgtctaagtgagtaggcat

SEQ ID NO: 3036 - DNA, 20 bp, Artificial Sequence
  Synthetic
attgcttttacctagtgcta

SEQ ID NO: 3037 - DNA, 20 bp, Artificial Sequence
  Synthetic
ctggcttctaggtttctgct

SEQ ID NO: 3038 - DNA, 20 bp, Artificial Sequence
  Synthetic
caagcgggacaaggcccacg

SEQ ID NO: 3039 - DNA, 20 bp, Artificial Sequence
  Synthetic
ggagggctagccggccggcc

SEQ ID NO: 3040 - DNA, 20 bp, Artificial Sequence
  Synthetic
cagcagcaccttctgtgagc

SEQ ID NO: 3041 - DNA, 20 bp, Artificial Sequence
  Synthetic
cctcaaggcctgggtgctgc

SEQ ID NO: 3042 - DNA, 20 bp, Artificial Sequence
  Synthetic
tacgcctccagcaggaccac

SEQ ID NO: 3043 - DNA, 20 bp, Artificial Sequence
  Synthetic
tgggaagctagagccacacc

SEQ ID NO: 3044 - DNA, 20 bp, Artificial Sequence
  Synthetic
tctttcccacacggccgtcc

SEQ ID NO: 3045 - DNA, 20 bp, Artificial Sequence
  Synthetic
tgcaggttagttcctgtccc

SEQ ID NO: 3046 - DNA, 20 bp, Artificial Sequence
  Synthetic
ttctagaatgatgacggtga

SEQ ID NO: 3047 - DNA, 20 bp, Artificial Sequence
  Synthetic
tctcagcgtttatcactgtc

SEQ ID NO: 3048 - DNA, 20 bp, Artificial Sequence
  Synthetic
agctacagagagctgggctg

SEQ ID NO: 3049 - DNA, 20 bp, Artificial Sequence
  Synthetic
gatctccagctgtgcaaact

SEQ ID NO: 3050 - DNA, 20 bp, Artificial Sequence
  Synthetic
acgaccaggtatggtgcggc

SEQ ID NO: 3051 - DNA, 20 bp, Artificial Sequence
  Synthetic
ccacatactgtccgagctgg

SEQ ID NO: 3052 - DNA, 20 bp, Artificial Sequence
  Synthetic
aacagcatctgggaaagtag

SEQ ID NO: 3053 - DNA, 20 bp, Artificial Sequence
  Synthetic
ccattggaaacagcgcatgg

SEQ ID NO: 3054 - DNA, 20 bp, Artificial Sequence
  Synthetic
cgaagcggccccgggcgcga

SEQ ID NO: 3055 - DNA, 20 bp, Artificial Sequence
  Synthetic
agagaagcccctggatggcc

SEQ ID NO: 3056 - DNA, 20 bp, Artificial Sequence
  Synthetic
attagaagagtaggaagatt

SEQ ID NO: 3057 - DNA, 20 bp, Artificial Sequence
  Synthetic
ctcttcctcatatctccaca

SEQ ID NO: 3058 - DNA, 20 bp, Artificial Sequence
  Synthetic
ctacttgttgtcccggtaga

SEQ ID NO: 3059 - DNA, 20 bp, Artificial Sequence
  Synthetic
ttccacagagcatgtctcag

SEQ ID NO: 3060 - DNA, 20 bp, Artificial Sequence
  Synthetic
gtgaccactgatcggaaacg

SEQ ID NO: 3061 - DNA, 20 bp, Artificial Sequence
  Synthetic
actatagcacagctttatcc

SEQ ID NO: 3062 - DNA, 20 bp, Artificial Sequence
  Synthetic
agacaccatgaaagctgcca

SEQ ID NO: 3063 - DNA, 20 bp, Artificial Sequence
  Synthetic
cggccagatgaccatccaat

SEQ ID NO: 3064 - DNA, 20 bp, Artificial Sequence
  Synthetic
aaagctgaaaagggacgaac

SEQ ID NO: 3065 - DNA, 20 bp, Artificial Sequence
  Synthetic
aagttagcaaaccaggagaa

SEQ ID NO: 3066 - DNA, 20 bp, Artificial Sequence
  Synthetic
ccaaggcctgatggtgaacc

SEQ ID NO: 3067 - DNA, 20 bp, Artificial Sequence
  Synthetic
cagctacagctccctgccat

SEQ ID NO: 3068 - DNA, 20 bp, Artificial Sequence
  Synthetic
ataaaagaaggccaggacat

SEQ ID NO: 3069 - DNA, 20 bp, Artificial Sequence
  Synthetic
ctcaggaatcagatgcacca

SEQ ID NO: 3070 - DNA, 20 bp, Artificial Sequence
  Synthetic
tcacctcttggcagctcttt

SEQ ID NO: 3071 - DNA, 20 bp, Artificial Sequence
  Synthetic
aacagccagctggggtagaa

SEQ ID NO: 3072 - DNA, 20 bp, Artificial Sequence
  Synthetic
gtcactggttctcgtggtcc

SEQ ID NO: 3073 - DNA, 20 bp, Artificial Sequence
  Synthetic
ataatcctagtttacttcag

SEQ ID NO: 3074 - DNA, 20 bp, Artificial Sequence
  Synthetic
cgcagatctgatactcaaag

SEQ ID NO: 3075 - DNA, 20 bp, Artificial Sequence
  Synthetic
gctaccagaaatgccgagcc

SEQ ID NO: 3076 - DNA, 20 bp, Artificial Sequence
  Synthetic
gcgtgagctacgggtcccac

SEQ ID NO: 3077 - DNA, 20 bp, Artificial Sequence
  Synthetic
aatctgattccagaacagga

SEQ ID NO: 3078 - DNA, 20 bp, Artificial Sequence
  Synthetic
ggaccccctggccgactacc

SEQ ID NO: 3079 - DNA, 20 bp, Artificial Sequence
  Synthetic
tggaagccctgagggtggag

SEQ ID NO: 3080 - DNA, 20 bp, Artificial Sequence
  Synthetic
gatggcatttcaagactggt

SEQ ID NO: 3081 - DNA, 20 bp, Artificial Sequence
  Synthetic
aatccctgtaaagatattat

SEQ ID NO: 3082 - DNA, 20 bp, Artificial Sequence
  Synthetic
agggcaaggagtgcaggtga

SEQ ID NO: 3083 - DNA, 20 bp, Artificial Sequence
  Synthetic
cagtggatacatctcgggca

SEQ ID NO: 3084 - DNA, 20 bp, Artificial Sequence
  Synthetic
ccttggctcacttcagcagc

SEQ ID NO: 3085 - DNA, 20 bp, Artificial Sequence
  Synthetic
cacaacatgcccatttatga

SEQ ID NO: 3086 - DNA, 20 bp, Artificial Sequence
  Synthetic
gctagtgaagttggcaaacc

SEQ ID NO: 3087 - DNA, 20 bp, Artificial Sequence
  Synthetic
cccttcccaattgtctggaa

SEQ ID NO: 3088 - DNA, 20 bp, Artificial Sequence
  Synthetic
tgactataaatggagtgaga

SEQ ID NO: 3089 - DNA, 20 bp, Artificial Sequence
  Synthetic
ctgagttctccatgagtgtt

SEQ ID NO: 3090 - DNA, 20 bp, Artificial Sequence
  Synthetic
aggcagaagactctgggtct

SEQ ID NO: 3091 - DNA, 20 bp, Artificial Sequence
  Synthetic
cgagtggtgccgcacgaagc

SEQ ID NO: 3092 - DNA, 20 bp, Artificial Sequence
  Synthetic
ctgactgaagtggacggaca

SEQ ID NO: 3093 - DNA, 20 bp, Artificial Sequence
  Synthetic
ggatgaacagggcccagcac

SEQ ID NO: 3094 - DNA, 20 bp, Artificial Sequence
  Synthetic
actgaagcacggggtcttgc

SEQ ID NO: 3095 - DNA, 20 bp, Artificial Sequence
  Synthetic
atcagccccgctggaaaaga

SEQ ID NO: 3096 - DNA, 20 bp, Artificial Sequence
  Synthetic
agaagccacacaatatcaag

SEQ ID NO: 3097 - DNA, 20 bp, Artificial Sequence
  Synthetic
gtacgctcttgaggttgtaa

SEQ ID NO: 3098 - DNA, 20 bp, Artificial Sequence
  Synthetic
ccaccttcatgccaatgtca

SEQ ID NO: 3099 - DNA, 20 bp, Artificial Sequence
  Synthetic
gcttggccaacttcccaaac

SEQ ID NO: 3100 - DNA, 20 bp, Artificial Sequence
  Synthetic
actcagagttgccgtattcg

SEQ ID NO: 3101 - DNA, 20 bp, Artificial Sequence
  Synthetic
ctgtcttttagaacaggatg

SEQ ID NO: 3102 - DNA, 20 bp, Artificial Sequence
  Synthetic
cgtcgagcttctgcttctcc

SEQ ID NO: 3103 - DNA, 20 bp, Artificial Sequence
  Synthetic
tcttcaagatatcaaagaac

SEQ ID NO: 3104 - DNA, 20 bp, Artificial Sequence
  Synthetic
gggctagagcatctttgagc

SEQ ID NO: 3105 - DNA, 20 bp, Artificial Sequence
  Synthetic
cgagggggcccctctcccca

SEQ ID NO: 3106 - DNA, 20 bp, Artificial Sequence
  Synthetic
ggctcacagggcacagagca

SEQ ID NO: 3107 - DNA, 20 bp, Artificial Sequence
  Synthetic
ccactggggcccccgagacc

SEQ ID NO: 3108 - DNA, 20 bp, Artificial Sequence
  Synthetic
ccaaggcctcgaggtaacag

SEQ ID NO: 3109 - DNA, 20 bp, Artificial Sequence
  Synthetic
aaaagtgaacagggtccccc

SEQ ID NO: 3110 - DNA, 20 bp, Artificial Sequence
  Synthetic
tggtgttggataaatccggg

SEQ ID NO: 3111 - DNA, 20 bp, Artificial Sequence
  Synthetic
cagctcagttcgtggacgcc

SEQ ID NO: 3112 - DNA, 20 bp, Artificial Sequence
  Synthetic
ttcactcctagaagttcttc

SEQ ID NO: 3113 - DNA, 20 bp, Artificial Sequence
  Synthetic
agcatggatgggatgtgctg

SEQ ID NO: 3114 - DNA, 20 bp, Artificial Sequence
  Synthetic
gatagggagttgccaggaga

SEQ ID NO: 3115 - DNA, 20 bp, Artificial Sequence
  Synthetic
cgagaacctgctggaccaaa

SEQ ID NO: 3116 - DNA, 20 bp, Artificial Sequence
  Synthetic
ggacttggcagctgcgcggc

SEQ ID NO: 3117 - DNA, 20 bp, Artificial Sequence
  Synthetic
ggtcttgctagtgctcgggt

SEQ ID NO: 3118 - DNA, 20 bp, Artificial Sequence
  Synthetic
cagcaccatgacccaggtga

SEQ ID NO: 3119 - DNA, 20 bp, Artificial Sequence
  Synthetic
agaagcacatggcttcataa

SEQ ID NO: 3120 - DNA, 20 bp, Artificial Sequence
  Synthetic
ctcaaggtccaggttaaatc

SEQ ID NO: 3121 - DNA, 20 bp, Artificial Sequence
  Synthetic
ccgtgctgaggctgttcgtg

SEQ ID NO: 3122 - DNA, 20 bp, Artificial Sequence
  Synthetic
ggctgtcatcaccaatccca

SEQ ID NO: 3123 - DNA, 20 bp, Artificial Sequence
  Synthetic
gagagcagtcatctttcccc

SEQ ID NO: 3124 - DNA, 20 bp, Artificial Sequence
  Synthetic
gccaagacccacttcaaaga

SEQ ID NO: 3125 - DNA, 20 bp, Artificial Sequence
  Synthetic
aaagatgaaacaggtgaacg

SEQ ID NO: 3126 - DNA, 20 bp, Artificial Sequence
  Synthetic
ttcaccctgagagacctctc

SEQ ID NO: 3127 - DNA, 20 bp, Artificial Sequence
  Synthetic
cccagaaaagatggtgttcc

SEQ ID NO: 3128 - DNA, 20 bp, Artificial Sequence
  Synthetic
gggcatcctagggaatgtcc

SEQ ID NO: 3129 - DNA, 20 bp, Artificial Sequence
  Synthetic
cgcacaaggagctctacaag

SEQ ID NO: 3130 - DNA, 20 bp, Artificial Sequence
  Synthetic
gctacacccagggcgctagc

SEQ ID NO: 3131 - DNA, 20 bp, Artificial Sequence
  Synthetic
tctacagctctgggaggctc

SEQ ID NO: 3132 - DNA, 20 bp, Artificial Sequence
  Synthetic
gtatggcaaaggtgcccttg

SEQ ID NO: 3133 - DNA, 20 bp, Artificial Sequence
  Synthetic
ctggcagaaggcctctgtgg

SEQ ID NO: 3134 - DNA, 20 bp, Artificial Sequence
  Synthetic
gctaggggtggtggctgttg

SEQ ID NO: 3135 - DNA, 20 bp, Artificial Sequence
  Synthetic
gatccggttctggctccagt

SEQ ID NO: 3136 - DNA, 20 bp, Artificial Sequence
  Synthetic
acagggccttagtgtatcac

SEQ ID NO: 3137 - DNA, 20 bp, Artificial Sequence
  Synthetic
caggatgacccaggacttaa

SEQ ID NO: 3138 - DNA, 20 bp, Artificial Sequence
  Synthetic
agtgctccagtttacctaaa

SEQ ID NO: 3139 - DNA, 20 bp, Artificial Sequence
  Synthetic
ctgggagatgatgctgatcc

SEQ ID NO: 3140 - DNA, 20 bp, Artificial Sequence
  Synthetic
acctacaccctagccaagtg

SEQ ID NO: 3141 - DNA, 20 bp, Artificial Sequence
  Synthetic
tgactagaaggacgtcctgt

SEQ ID NO: 3142 - DNA, 20 bp, Artificial Sequence
  Synthetic
cagagtggtaggagtgtgga

SEQ ID NO: 3143 - DNA, 20 bp, Artificial Sequence
  Synthetic
catccagtagatcaaggaga

SEQ ID NO: 3144 - DNA, 20 bp, Artificial Sequence
  Synthetic
actgaatcaccaggaattcc

SEQ ID NO: 3145 - DNA, 20 bp, Artificial Sequence
  Synthetic
atcaagtctccgctgatacc

SEQ ID NO: 3146 - DNA, 20 bp, Artificial Sequence
  Synthetic
taataactcaagcaaccttc

SEQ ID NO: 3147 - DNA, 20 bp, Artificial Sequence
  Synthetic
agcacttgatgtgcttggct

SEQ ID NO: 3148 - DNA, 20 bp, Artificial Sequence
  Synthetic
gcgctagtggtacggggaga

SEQ ID NO: 3149 - DNA, 20 bp, Artificial Sequence
  Synthetic
cactagtggttgacgaactc

SEQ ID NO: 3150 - DNA, 20 bp, Artificial Sequence
  Synthetic
gatggactacttcaggcgtg

SEQ ID NO: 3151 - DNA, 20 bp, Artificial Sequence
  Synthetic
aactgctagatgccgttcaa

SEQ ID NO: 3152 - DNA, 20 bp, Artificial Sequence
  Synthetic
gtgaagtgtctatctttcat

SEQ ID NO: 3153 - DNA, 20 bp, Artificial Sequence
  Synthetic
cacatggagaagatcttctc

SEQ ID NO: 3154 - DNA, 20 bp, Artificial Sequence
  Synthetic
agctgtctaacagttggcct

SEQ ID NO: 3155 - DNA, 20 bp, Artificial Sequence
  Synthetic
gagctagatccggtccatca

SEQ ID NO: 3156 - DNA, 20 bp, Artificial Sequence
  Synthetic
ggttctaatttggaataggc

SEQ ID NO: 3157 - DNA, 20 bp, Artificial Sequence
  Synthetic
cggaaggtctaagagatggt

SEQ ID NO: 3158 - DNA, 20 bp, Artificial Sequence
  Synthetic
gtctaaagaacacccccagg

SEQ ID NO: 3159 - DNA, 20 bp, Artificial Sequence
  Synthetic
gaagctagcgagtcagtaac

SEQ ID NO: 3160 - DNA, 20 bp, Artificial Sequence
  Synthetic
cccagactctaccatttttc

SEQ ID NO: 3161 - DNA, 20 bp, Artificial Sequence
  Synthetic
gaaactaggtgaggccgcca

SEQ ID NO: 3162 - DNA, 20 bp, Artificial Sequence
  Synthetic
aagcaaagagaggccctaat

SEQ ID NO: 3163 - DNA, 20 bp, Artificial Sequence
  Synthetic
agacgaagtacaactgaagg

SEQ ID NO: 3164 - DNA, 20 bp, Artificial Sequence
  Synthetic
tctaagtgttgggtccgtcc

SEQ ID NO: 3165 - DNA, 20 bp, Artificial Sequence
  Synthetic
aatgactatgcctacctcaa

SEQ ID NO: 3166 - DNA, 20 bp, Artificial Sequence
  Synthetic
cctgaacgagagctttggct

SEQ ID NO: 3167 - DNA, 20 bp, Artificial Sequence
  Synthetic
cctagagggagacggtgcgc

SEQ ID NO: 3168 - DNA, 20 bp, Artificial Sequence
  Synthetic
ggctaaaaacggggtctctg

SEQ ID NO: 3169 - DNA, 20 bp, Artificial Sequence
  Synthetic
ggactagtgaatgcttcctg

SEQ ID NO: 3170 - DNA, 20 bp, Artificial Sequence
  Synthetic
acagagctagctaacgatct

SEQ ID NO: 3171 - DNA, 20 bp, Artificial Sequence
  Synthetic
cttgaactagcggtccccat

SEQ ID NO: 3172 - DNA, 20 bp, Artificial Sequence
  Synthetic
agcactatgccttaacagat

SEQ ID NO: 3173 - DNA, 20 bp, Artificial Sequence
  Synthetic
gtccccaaaaccgttgttgc

SEQ ID NO: 3174 - DNA, 20 bp, Artificial Sequence
  Synthetic
gaagactgcaggtcagccct

SEQ ID NO: 3175 - DNA, 20 bp, Artificial Sequence
  Synthetic
tctcccccttctccctgaaa

SEQ ID NO: 3176 - DNA, 20 bp, Artificial Sequence
  Synthetic
gacccctgccagcgtcatgg

SEQ ID NO: 3177 - DNA, 20 bp, Artificial Sequence
  Synthetic
gcactgctaagcgccagcct

SEQ ID NO: 3178 - DNA, 20 bp, Artificial Sequence
  Synthetic
aaagaactctgaattaggta

SEQ ID NO: 3179 - DNA, 20 bp, Artificial Sequence
  Synthetic
gacctgctagaggaagtcga

SEQ ID NO: 3180 - DNA, 20 bp, Artificial Sequence
  Synthetic
gaactaatgcgccctgttca

SEQ ID NO: 3181 - DNA, 20 bp, Artificial Sequence
  Synthetic
gaggcacatataggtcttga

SEQ ID NO: 3182 - DNA, 20 bp, Artificial Sequence
  Synthetic
gggaagctaggccaaagtgc

SEQ ID NO: 3183 - DNA, 20 bp, Artificial Sequence
  Synthetic
tccctaggtgaagatggaaa

SEQ ID NO: 3184 - DNA, 20 bp, Artificial Sequence
  Synthetic
gccccaacatagtaattcct

SEQ ID NO: 3185 - DNA, 20 bp, Artificial Sequence
  Synthetic
ctctgagctagttgatctcg

SEQ ID NO: 3186 - DNA, 20 bp, Artificial Sequence
  Synthetic
gtagtactatacgccatggc

SEQ ID NO: 3187 - DNA, 20 bp, Artificial Sequence
  Synthetic
acagtgctaagaggaggacc

SEQ ID NO: 3188 - DNA, 20 bp, Artificial Sequence
  Synthetic
ctgaagctgaagtagagcgc

SEQ ID NO: 3189 - DNA, 20 bp, Artificial Sequence
  Synthetic
cacgtctaaagaacaccccc

SEQ ID NO: 3190 - DNA, 20 bp, Artificial Sequence
  Synthetic
ggttaccctacttggagagc

SEQ ID NO: 3191 - DNA, 20 bp, Artificial Sequence
  Synthetic
attcactctaaagctggaaa

SEQ ID NO: 3192 - DNA, 20 bp, Artificial Sequence
  Synthetic
agccagctacatgtaggggt

SEQ ID NO: 3193 - DNA, 20 bp, Artificial Sequence
  Synthetic
gctctaagtgccattgccgt

SEQ ID NO: 3194 - DNA, 20 bp, Artificial Sequence
  Synthetic
gcgtacttctaacaggtcag

SEQ ID NO: 3195 - DNA, 20 bp, Artificial Sequence
  Synthetic
gctggggatctaggggccgg

SEQ ID NO: 3196 - DNA, 20 bp, Artificial Sequence
  Synthetic
gccgctgtggtgcaccacgc

SEQ ID NO: 3197 - DNA, 20 bp, Artificial Sequence
  Synthetic
ctctagggcatggggtggct

SEQ ID NO: 3198 - DNA, 20 bp, Artificial Sequence
  Synthetic
ggaaggtctaagagatggta

SEQ ID NO: 3199 - DNA, 20 bp, Artificial Sequence
  Synthetic
gaggacgacgacgtcaccaa

SEQ ID NO: 3200 - protein, 1859 aa, Artificial Sequence
  Synthetic
MKRTADGSEFESPKKKRKVSSETGPVAVDPTLRRRIEPHEFEVFFDPRELRKETCLLYEINWGGRHSIWRHTSQNTNKHVEVNFIEKFTTERYFCPNTRCSITWFLSWSPCGECSRAITEFLSRYPHVTLFIYIARLYHHADPRNRQGLRDLISSGVTIQIMTEQESGYCWRNFVNYSPSNEAHWPRYPHLWVRLYVLELYCIILGLPPCLNILRRKQPQLTFFTIALQSCHYQRLPPHILWATGLKSGGSSGGSSGSETPGTSESATPESSGGSSGGDKKYSIGLAIGTNSVGWAVITDEYKVPSKKFKVLGNTDRHSIKKNLIGALLFDSGETAEATRLKRTARRRYTRRKNRICYLQEIFSNEMAKVDDSFFHRLEESFLVEEDKKHERHPIFGNIVDEVAYHEKYPTIYHLRKKLVDSTDKADLRLIYLALAHMIKFRGHFLIEGDLNPDNSDVDKLFIQLVQTYNQLFEENPINASGVDAKAILSARLSKSRRLENLIAQLPGEKKNGLFGNLIALSLGLTPNFKSNFDLAEDAKLQLSKDTYDDDLDNLLAQIGDQYADLFLAAKNLSDAILLSDILRVNTEITKAPLSASMIKRYDEHHQDLTLLKALVRQQLPEKYKEIFFDQSKNGYAGYIDGGASQEEFYKFIKPILEKMDGTEELLVKLNREDLLRKQRTFDNGSIPHQIHLGELHAILRRQEDFYPFLKDNREKIEKILTFRIPYYVGPLARGNSRFAWMTRKSEETITPWNFEEVVDKGASAQSFIERMTNFDKNLPNEKVLPKHSLLYEYFTVYNELTKVKYVTEGMRKPAFLSGEQKKAIVDLLFKTNRKVTVKQLKEDYFKKIECFDSVEISGVEDRFNASLGTYHDLLKIIKDKDFLDNEENEDILEDIVLTLTLFEDREMIEERLKTYAHLFDDKVMKQLKRRRYTGWGRLSRKLINGIRDKQSGKTILDFLKSDGFANRNFMQLIHDDSLTFKEDIQKAQVSGQGDSLHEHIANLAGSPAIKKGILQTVKVVDELVKVMGRHKPENIVIEMARENQTTQKGQKNSRERMKRIEEGIKELGSQILKEHPVENTQLQNEKLYLYYLQNGRDMYVDQELDINRLSDYDVDHIVPQSFLKDDSIDNKVLTRSDKNRGKSDNVPSEEVVKKMKNYWRQLLNAKLITQRKFDNLTKAERGGLSELDKAGFIKRQLVETRQITKHVAQILDSRMNTKYDENDKLIREVKVITLKSKLVSDFRKDFQFYKVREINNYHHAHDAYLNAVVGTALIKKYPKLESEFVYGDYKVYDVRKMIAKSEQEIGKATAKYFFYSNIMNFFKTEITLANGEIRKRPLIETNGETGEIVWDKGRDFATVRKVLSMPQVNIVKKTEVQTGGFSKESILPKRNSDKLIARKKDWDPKKYGGFDSPTVAYSVLVVAKVEKGKSKKLKSVKELLGITIMERSSFEKNPIDFLEAKGYKEVKKDLIIKLPKYSLFELENGRKRMLASAGELQKGNELALPSKYVNFLYLASHYEKLKGSPEDNEQKQLFVEQHKHYLDEIIEQISEFSKRVILADANLDKVLSAYNKHRDKPIREQAENIIHLFTLTNLGAPAAFKYFDTTIDRKRYTSTKEVLDATLIHQSITGLYETRIDLSQLGGDSGGSGGSGGSTNLSDIIEKETGKQLVIQESILMLPEEVEEVIGNKPESDILVHTAYDESTDENVMLLTSDAPEYKPWALVIQDSNGENKIKMLSGGSGGSGGSTNLSDIIEKETGKQLVIQESILMLPEEVEEVIGNKPESDILVHTAYDESTDENVMLLTSDAPEYKPWALVIQDSNGENKIKMLSGGSPKKKRKVKRTADGSEFEPKKKRKV

SEQ ID NO: 3201 - protein, 1859 aa, Artificial Sequence
  Synthetic
MKRTADGSEFESPKKKRKVSSETGPVAVDPTLRRRIEPHEFEVFFDPRELRKETCLLYEINWGGREAIWRHTSQNTNKHVEVNFIEKFTTERYFCPNTRCSITWFLSWSPCGECSRAITEFLSRYPHVTLFIYIARLYHHADPRNRQGLRDLISSGVTIQIMTEQESGYCWRNFVNYSPSNEAHWPRYPHLWVRLYVLELYCIILGLPPCLNILRRKQPQLTFFTIALQSCHYQRLPPHILWATGLKSGGSSGGSSGSETPGTSESATPESSGGSSGGDKKYSIGLAIGTNSVGWAVITDEYKVPSKKFKVLGNTDRHSIKKNLIGALLFDSGETAEATRLKRTARRRYTRRKNRICYLQEIFSNEMAKVDDSFFHRLEESFLVEEDKKHERHPIFGNIVDEVAYHEKYPTIYHLRKKLVDSTDKADLRLIYLALAHMIKFRGHFLIEGDLNPDNSDVDKLFIQLVQTYNQLFEENPINASGVDAKAILSARLSKSRRLENLIAQLPGEKKNGLFGNLIALSLGLTPNFKSNFDLAEDAKLQLSKDTYDDDLDNLLAQIGDQYADLFLAAKNLSDAILLSDILRVNTEITKAPLSASMIKRYDEHHQDLTLLKALVRQQLPEKYKEIFFDQSKNGYAGYIDGGASQEEFYKFIKPILEKMDGTEELLVKLNREDLLRKQRTFDNGSIPHQIHLGELHAILRRQEDFYPFLKDNREKIEKILTFRIPYYVGPLARGNSRFAWMTRKSEETITPWNFEEVVDKGASAQSFIERMTNFDKNLPNEKVLPKHSLLYEYFTVYNELTKVKYVTEGMRKPAFLSGEQKKAIVDLLFKTNRKVTVKQLKEDYFKKIECFDSVEISGVEDRFNASLGTYHDLLKIIKDKDFLDNEENEDILEDIVLTLTLFEDREMIEERLKTYAHLFDDKVMKQLKRRRYTGWGRLSRKLINGIRDKQSGKTILDFLKSDGFANRNFMQLIHDDSLTFKEDIQKAQVSGQGDSLHEHIANLAGSPAIKKGILQTVKVVDELVKVMGRHKPENIVIEMARENQTTQKGQKNSRERMKRIEEGIKELGSQILKEHPVENTQLQNEKLYLYYLQNGRDMYVDQELDINRLSDYDVDHIVPQSFLKDDSIDNKVLTRSDKNRGKSDNVPSEEVVKKMKNYWRQLLNAKLITQRKFDNLTKAERGGLSELDKAGFIKRQLVETRQITKHVAQILDSRMNTKYDENDKLIREVKVITLKSKLVSDFRKDFQFYKVREINNYHHAHDAYLNAVVGTALIKKYPKLESEFVYGDYKVYDVRKMIAKSEQEIGKATAKYFFYSNIMNFFKTEITLANGEIRKRPLIETNGETGEIVWDKGRDFATVRKVLSMPQVNIVKKTEVQTGGFSKESILPKRNSDKLIARKKDWDPKKYGGFDSPTVAYSVLVVAKVEKGKSKKLKSVKELLGITIMERSSFEKNPIDFLEAKGYKEVKKDLIIKLPKYSLFELENGRKRMLASAGELQKGNELALPSKYVNFLYLASHYEKLKGSPEDNEQKQLFVEQHKHYLDEIIEQISEFSKRVILADANLDKVLSAYNKHRDKPIREQAENIIHLFTLTNLGAPAAFKYFDTTIDRKRYTSTKEVLDATLIHQSITGLYETRIDLSQLGGDSGGSGGSGGSTNLSDIIEKETGKQLVIQESILMLPEEVEEVIGNKPESDILVHTAYDESTDENVMLLTSDAPEYKPWALVIQDSNGENKIKMLSGGSGGSGGSTNLSDIIEKETGKQLVIQESILMLPEEVEEVIGNKPESDILVHTAYDESTDENVMLLTSDAPEYKPWALVIQDSNGENKIKMLSGGSPKKKRKVKRTADGSEFEPKKKRKV

SEQ ID NO: 3202 - protein, 1828 aa, Artificial Sequence
  Synthetic
MKRTADGSEFESPKKKRKVDSLLMNRRKFLYQFKNVRWAKGRRETYLCYVVKRRDSATSFSLDFGYLRNKNGCHVELLFLRYISDWDLDPGRCYRVTWFTSWSPCYDCARHVADFLRGNPNLSLRIFTARLYFCEDRKAEPEGLRRLHRAGVQIAIMTFKDYFYCWNTFVENHERTFKAWEGLHENSVRLSRQLRRILLPLYEVDDLRDAFRTLGLSGGSSGGSSGSETPGTSESATPESSGGSSGGDKKYSIGLAIGTNSVGWAVITDEYKVPSKKFKVLGNTDRHSIKKNLIGALLFDSGETAEATRLKRTARRRYTRRKNRICYLQEIFSNEMAKVDDSFFHRLEESFLVEEDKKHERHPIFGNIVDEVAYHEKYPTIYHLRKKLVDSTDKADLRLIYLALAHMIKFRGHFLIEGDLNPDNSDVDKLFIQLVQTYNQLFEENPINASGVDAKAILSARLSKSRRLENLIAQLPGEKKNGLFGNLIALSLGLTPNFKSNFDLAEDAKLQLSKDTYDDDLDNLLAQIGDQYADLFLAAKNLSDAILLSDILRVNTEITKAPLSASMIKRYDEHHQDLTLLKALVRQQLPEKYKEIFFDQSKNGYAGYIDGGASQEEFYKFIKPILEKMDGTEELLVKLNREDLLRKQRTFDNGSIPHQIHLGELHAILRRQEDFYPFLKDNREKIEKILTFRIPYYVGPLARGNSRFAWMTRKSEETITPWNFEEVVDKGASAQSFIERMTNFDKNLPNEKVLPKHSLLYEYFTVYNELTKVKYVTEGMRKPAFLSGEQKKAIVDLLFKTNRKVTVKQLKEDYFKKIECFDSVEISGVEDRFNASLGTYHDLLKIIKDKDFLDNEENEDILEDIVLTLTLFEDREMIEERLKTYAHLFDDKVMKQLKRRRYTGWGRLSRKLINGIRDKQSGKTILDFLKSDGFANRNFMQLIHDDSLTFKEDIQKAQVSGQGDSLHEHIANLAGSPAIKKGILQTVKVVDELVKVMGRHKPENIVIEMARENQTTQKGQKNSRERMKRIEEGIKELGSQILKEHPVENTQLQNEKLYLYYLQNGRDMYVDQELDINRLSDYDVDHIVPQSFLKDDSIDNKVLTRSDKNRGKSDNVPSEEVVKKMKNYWRQLLNAKLITQRKFDNLTKAERGGLSELDKAGFIKRQLVETRQITKHVAQILDSRMNTKYDENDKLIREVKVITLKSKLVSDFRKDFQFYKVREINNYHHAHDAYLNAVVGTALIKKYPKLESEFVYGDYKVYDVRKMIAKSEQEIGKATAKYFFYSNIMNFFKTEITLANGEIRKRPLIETNGETGEIVWDKGRDFATVRKVLSMPQVNIVKKTEVQTGGFSKESILPKRNSDKLIARKKDWDPKKYGGFDSPTVAYSVLVVAKVEKGKSKKLKSVKELLGITIMERSSFEKNPIDFLEAKGYKEVKKDLIIKLPKYSLFELENGRKRMLASAGELQKGNELALPSKYVNFLYLASHYEKLKGSPEDNEQKQLFVEQHKHYLDEIIEQISEFSKRVILADANLDKVLSAYNKHRDKPIREQAENIIHLFTLTNLGAPAAFKYFDTTIDRKRYTSTKEVLDATLIHQSITGLYETRIDLSQLGGDSGGSGGSGGSTNLSDIIEKETGKQLVIQESILMLPEEVEEVIGNKPESDILVHTAYDESTDENVMLLTSDAPEYKPWALVIQDSNGENKIKMLSGGSGGSGGSTNLSDIIEKETGKQLVIQESILMLPEEVEEVIGNKPESDILVHTAYDESTDENVMLLTSDAPEYKPWALVIQDSNGENKIKMLSGGSPKKKRKVKRTADGSEFEPKKKRKV

SEQ ID NO: 3203 - protein, 1838 aa, Artificial Sequence
  Synthetic
MKRTADGSEFESPKKKRKVTDAEYVRIHEKLDIYTFKKQFFNNKKSVSHRCYVLFELKRRGERRACFWGYAVNKPQSGTERGIHAEIFSIRKVEEYLRDNPGQFTINWYSSWSPCADCAEKILEWYNQELRGNGHTLKIWACKLYYEKNARNQIGLWNLRDNGVGLNVMVSEHYQCCRKIFIQSSHNQLNENRWLEKTLKRAEKRRSELSIMIQVKILHTTKSPAVSGGSSGGSSGSETPGTSESATPESSGGSSGGDKKYSIGLAIGTNSVGWAVITDEYKVPSKKFKVLGNTDRHSIKKNLIGALLFDSGETAEATRLKRTARRRYTRRKNRICYLQEIFSNEMAKVDDSFFHRLEESFLVEEDKKHERHPIFGNIVDEVAYHEKYPTIYHLRKKLVDSTDKADLRLIYLALAHMIKFRGHFLIEGDLNPDNSDVDKLFIQLVQTYNQLFEENPINASGVDAKAILSARLSKSRRLENLIAQLPGEKKNGLFGNLIALSLGLTPNFKSNFDLAEDAKLQLSKDTYDDDLDNLLAQIGDQYADLFLAAKNLSDAILLSDILRVNTEITKAPLSASMIKRYDEHHQDLTLLKALVRQQLPEKYKEIFFDQSKNGYAGYIDGGASQEEFYKFIKPILEKMDGTEELLVKLNREDLLRKQRTFDNGSIPHQIHLGELHAILRRQEDFYPFLKDNREKIEKILTFRIPYYVGPLARGNSRFAWMTRKSEETITPWNFEEVVDKGASAQSFIERMTNFDKNLPNEKVLPKHSLLYEYFTVYNELTKVKYVTEGMRKPAFLSGEQKKAIVDLLFKTNRKVTVKQLKEDYFKKIECFDSVEISGVEDRFNASLGTYHDLLKIIKDKDFLDNEENEDILEDIVLTLTLFEDREMIEERLKTYAHLFDDKVMKQLKRRRYTGWGRLSRKLINGIRDKQSGKTILDFLKSDGFANRNFMQLIHDDSLTFKEDIQKAQVSGQGDSLHEHIANLAGSPAIKKGILQTVKVVDELVKVMGRHKPENIVIEMARENQTTQKGQKNSRERMKRIEEGIKELGSQILKEHPVENTQLQNEKLYLYYLQNGRDMYVDQELDINRLSDYDVDHIVPQSFLKDDSIDNKVLTRSDKNRGKSDNVPSEEVVKKMKNYWRQLLNAKLITQRKFDNLTKAERGGLSELDKAGFIKRQLVETRQITKHVAQILDSRMNTKYDENDKLIREVKVITLKSKLVSDFRKDFQFYKVREINNYHHAHDAYLNAVVGTALIKKYPKLESEFVYGDYKVYDVRKMIAKSEQEIGKATAKYFFYSNIMNFFKTEITLANGEIRKRPLIETNGETGEIVWDKGRDFATVRKVLSMPQVNIVKKTEVQTGGFSKESILPKRNSDKLIARKKDWDPKKYGGFDSPTVAYSVLVVAKVEKGKSKKLKSVKELLGITIMERSSFEKNPIDFLEAKGYKEVKKDLIIKLPKYSLFELENGRKRMLASAGELQKGNELALPSKYVNFLYLASHYEKLKGSPEDNEQKQLFVEQHKHYLDEIIEQISEFSKRVILADANLDKVLSAYNKHRDKPIREQAENIIHLFTLTNLGAPAAFKYFDTTIDRKRYTSTKEVLDATLIHQSITGLYETRIDLSQLGGDSGGSGGSGGSTNLSDIIEKETGKQLVIQESILMLPEEVEEVIGNKPESDILVHTAYDESTDENVMLLTSDAPEYKPWALVIQDSNGENKIKMLSGGSGGSGGSTNLSDIIEKETGKQLVIQESILMLPEEVEEVIGNKPESDILVHTAYDESTDENVMLLTSDAPEYKPWALVIQDSNGENKIKMLSGGSPKKKRKVKRTADGSEFEPKKKRKV

SEQ ID NO: 3204 - protein, 1858 aa, Artificial Sequence
  Synthetic
MKRTADGSEFESPKKKRKVSKTGPVAVDPTLRRRIEPHEFEVFFDPRELRKETCLLYEINWGGRHSIWRHTSQNTNKHVEVNFIEKFTTERYFCPNTRCSITWFLSWSPCGECSRAITEFLSRYPNVTLFIYIARLYHLANPRNRQGLRDLISSGVTIQIMTEQESGYCWHNFVNYSPSNESHWPRYPHLWVRLYVLELYCIILGLPPCLNILRRKQSQLTSFTIALQSCHYQRLPPHILWATGLKSGGSSGGSSGSETPGTSESATPESSGGSSGGDKKYSIGLAIGTNSVGWAVITDEYKVPSKKFKVLGNTDRHSIKKNLIGALLFDSGETAEATRLKRTARRRYTRRKNRICYLQEIFSNEMAKVDDSFFHRLEESFLVEEDKKHERHPIFGNIVDEVAYHEKYPTIYHLRKKLVDSTDKADLRLIYLALAHMIKFRGHFLIEGDLNPDNSDVDKLFIQLVQTYNQLFEENPINASGVDAKAILSARLSKSRRLENLIAQLPGEKKNGLFGNLIALSLGLTPNFKSNFDLAEDAKLQLSKDTYDDDLDNLLAQIGDQYADLFLAAKNLSDAILLSDILRVNTEITKAPLSASMIKRYDEHHQDLTLLKALVRQQLPEKYKEIFFDQSKNGYAGYIDGGASQEEFYKFIKPILEKMDGTEELLVKLNREDLLRKQRTFDNGSIPHQIHLGELHAILRRQEDFYPFLKDNREKIEKILTFRIPYYVGPLARGNSRFAWMTRKSEETITPWNFEEVVDKGASAQSFIERMTNFDKNLPNEKVLPKHSLLYEYFTVYNELTKVKYVTEGMRKPAFLSGEQKKAIVDLLFKTNRKVTVKQLKEDYFKKIECFDSVEISGVEDRFNASLGTYHDLLKIIKDKDFLDNEENEDILEDIVLTLTLFEDREMIEERLKTYAHLFDDKVMKQLKRRRYTGWGRLSRKLINGIRDKQSGKTILDFLKSDGFANRNFMQLIHDDSLTFKEDIQKAQVSGQGDSLHEHIANLAGSPAIKKGILQTVKVVDELVKVMGRHKPENIVIEMARENQTTQKGQKNSRERMKRIEEGIKELGSQILKEHPVENTQLQNEKLYLYYLQNGRDMYVDQELDINRLSDYDVDHIVPQSFLKDDSIDNKVLTRSDKNRGKSDNVPSEEVVKKMKNYWRQLLNAKLITQRKFDNLTKAERGGLSELDKAGFIKRQLVETRQITKHVAQILDSRMNTKYDENDKLIREVKVITLKSKLVSDFRKDFQFYKVREINNYHHAHDAYLNAVVGTALIKKYPKLESEFVYGDYKVYDVRKMIAKSEQEIGKATAKYFFYSNIMNFFKTEITLANGEIRKRPLIETNGETGEIVWDKGRDFATVRKVLSMPQVNIVKKTEVQTGGFSKESILPKRNSDKLIARKKDWDPKKYGGFDSPTVAYSVLVVAKVEKGKSKKLKSVKELLGITIMERSSFEKNPIDFLEAKGYKEVKKDLIIKLPKYSLFELENGRKRMLASAGELQKGNELALPSKYVNFLYLASHYEKLKGSPEDNEQKQLFVEQHKHYLDEIIEQISEFSKRVILADANLDKVLSAYNKHRDKPIREQAENIIHLFTLTNLGAPAAFKYFDTTIDRKRYTSTKEVLDATLIHQSITGLYETRIDLSQLGGDSGGSGGSGGSTNLSDIIEKETGKQLVIQESILMLPEEVEEVIGNKPESDILVHTAYDESTDENVMLLTSDAPEYKPWALVIQDSNGENKIKMLSGGSGGSGGSTNLSDIIEKETGKQLVIQESILMLPEEVEEVIGNKPESDILVHTAYDESTDENVMLLTSDAPEYKPWALVIQDSNGENKIKMLSGGSPKKKRKVKRTADGSEFEPKKKRKV

SEQ ID NO: 3205 - protein, 1829 aa, Artificial Sequence
  Synthetic
MKRTADGSEFESPKKKRKVEASPASGPRHLMDPHIFTSNFNNGIGRHKTYLCYEVERLDNGTSVKMDQHRGFLHGQAKNLLCGFYGRHAELRFLDLVPSLQLDPAQIYRVTWFISWSPCFSWGCAGEVRAFLQENTHVRLRIFAARIYDYDPLYKEALQMLRDAGAQVSIMTYDEFKHCWDTFVDHQGCPFQPWDGLDEHSQALSGRLRAILQNQGNSGGSSGGSSGSETPGTSESATPESSGGSSGGDKKYSIGLAIGTNSVGWAVITDEYKVPSKKFKVLGNTDRHSIKKNLIGALLFDSGETAEATRLKRTARRRYTRRKNRICYLQEIFSNEMAKVDDSFFHRLEESFLVEEDKKHERHPIFGNIVDEVAYHEKYPTIYHLRKKLVDSTDKADLRLIYLALAHMIKFRGHFLIEGDLNPDNSDVDKLFIQLVQTYNQLFEENPINASGVDAKAILSARLSKSRRLENLIAQLPGEKKNGLFGNLIALSLGLTPNFKSNFDLAEDAKLQLSKDTYDDDLDNLLAQIGDQYADLFLAAKNLSDAILLSDILRVNTEITKAPLSASMIKRYDEHHQDLTLLKALVRQQLPEKYKEIFFDQSKNGYAGYIDGGASQEEFYKFIKPILEKMDGTEELLVKLNREDLLRKQRTFDNGSIPHQIHLGELHAILRRQEDFYPFLKDNREKIEKILTFRIPYYVGPLARGNSRFAWMTRKSEETITPWNFEEVVDKGASAQSFIERMTNFDKNLPNEKVLPKHSLLYEYFTVYNELTKVKYVTEGMRKPAFLSGEQKKAIVDLLFKTNRKVTVKQLKEDYFKKIECFDSVEISGVEDRFNASLGTYHDLLKIIKDKDFLDNEENEDILEDIVLTLTLFEDREMIEERLKTYAHLFDDKVMKQLKRRRYTGWGRLSRKLINGIRDKQSGKTILDFLKSDGFANRNFMQLIHDDSLTFKEDIQKAQVSGQGDSLHEHIANLAGSPAIKKGILQTVKVVDELVKVMGRHKPENIVIEMARENQTTQKGQKNSRERMKRIEEGIKELGSQILKEHPVENTQLQNEKLYLYYLQNGRDMYVDQELDINRLSDYDVDHIVPQSFLKDDSIDNKVLTRSDKNRGKSDNVPSEEVVKKMKNYWRQLLNAKLITQRKFDNLTKAERGGLSELDKAGFIKRQLVETRQITKHVAQILDSRMNTKYDENDKLIREVKVITLKSKLVSDFRKDFQFYKVREINNYHHAHDAYLNAVVGTALIKKYPKLESEFVYGDYKVYDVRKMIAKSEQEIGKATAKYFFYSNIMNFFKTEITLANGEIRKRPLIETNGETGEIVWDKGRDFATVRKVLSMPQVNIVKKTEVQTGGFSKESILPKRNSDKLIARKKDWDPKKYGGFDSPTVAYSVLVVAKVEKGKSKKLKSVKELLGITIMERSSFEKNPIDFLEAKGYKEVKKDLIIKLPKYSLFELENGRKRMLASAGELQKGNELALPSKYVNFLYLASHYEKLKGSPEDNEQKQLFVEQHKHYLDEIIEQISEFSKRVILADANLDKVLSAYNKHRDKPIREQAENIIHLFTLTNLGAPAAFKYFDTTIDRKRYTSTKEVLDATLIHQSITGLYETRIDLSQLGGDSGGSGGSGGSTNLSDIIEKETGKQLVIQESILMLPEEVEEVIGNKPESDILVHTAYDESTDENVMLLTSDAPEYKPWALVIQDSNGENKIKMLSGGSGGSGGSTNLSDIIEKETGKQLVIQESILMLPEEVEEVIGNKPESDILVHTAYDESTDENVMLLTSDAPEYKPWALVIQDSNGENKIKMLSGGSPKKKRKVKRTADGSEFEPKKKRKV

SEQ ID NO: 3206 - protein, 1829 aa, Artificial Sequence
  Synthetic
MKRTADGSEFESPKKKRKVEASPASGPRHLMDPHIFTSNFNNGIGRHKAYLCYEVERLDNGTSVKMDQHRGFLHGQAKNLLCGFYGRHAELRFLDLVPSLQLDPAQIYRVTWFISWSPCFSWGCAGEVRAFLQENTHVRLRIFAARIYDYDPLYKEALQMLRDAGAQVSIMTYDEFKHCWDTFVDHQGCPFQPWDGLDEHSQALSGRLRAILQNQGNSGGSSGGSSGSETPGTSESATPESSGGSSGGDKKYSIGLAIGTNSVGWAVITDEYKVPSKKFKVLGNTDRHSIKKNLIGALLFDSGETAEATRLKRTARRRYTRRKNRICYLQEIFSNEMAKVDDSFFHRLEESFLVEEDKKHERHPIFGNIVDEVAYHEKYPTIYHLRKKLVDSTDKADLRLIYLALAHMIKFRGHFLIEGDLNPDNSDVDKLFIQLVQTYNQLFEENPINASGVDAKAILSARLSKSRRLENLIAQLPGEKKNGLFGNLIALSLGLTPNFKSNFDLAEDAKLQLSKDTYDDDLDNLLAQIGDQYADLFLAAKNLSDAILLSDILRVNTEITKAPLSASMIKRYDEHHQDLTLLKALVRQQLPEKYKEIFFDQSKNGYAGYIDGGASQEEFYKFIKPILEKMDGTEELLVKLNREDLLRKQRTFDNGSIPHQIHLGELHAILRRQEDFYPFLKDNREKIEKILTFRIPYYVGPLARGNSRFAWMTRKSEETITPWNFEEVVDKGASAQSFIERMTNFDKNLPNEKVLPKHSLLYEYFTVYNELTKVKYVTEGMRKPAFLSGEQKKAIVDLLFKTNRKVTVKQLKEDYFKKIECFDSVEISGVEDRFNASLGTYHDLLKIIKDKDFLDNEENEDILEDIVLTLTLFEDREMIEERLKTYAHLFDDKVMKQLKRRRYTGWGRLSRKLINGIRDKQSGKTILDFLKSDGFANRNFMQLIHDDSLTFKEDIQKAQVSGQGDSLHEHIANLAGSPAIKKGILQTVKVVDELVKVMGRHKPENIVIEMARENQTTQKGQKNSRERMKRIEEGIKELGSQILKEHPVENTQLQNEKLYLYYLQNGRDMYVDQELDINRLSDYDVDHIVPQSFLKDDSIDNKVLTRSDKNRGKSDNVPSEEVVKKMKNYWRQLLNAKLITQRKFDNLTKAERGGLSELDKAGFIKRQLVETRQITKHVAQILDSRMNTKYDENDKLIREVKVITLKSKLVSDFRKDFQFYKVREINNYHHAHDAYLNAVVGTALIKKYPKLESEFVYGDYKVYDVRKMIAKSEQEIGKATAKYFFYSNIMNFFKTEITLANGEIRKRPLIETNGETGEIVWDKGRDFATVRKVLSMPQVNIVKKTEVQTGGFSKESILPKRNSDKLIARKKDWDPKKYGGFDSPTVAYSVLVVAKVEKGKSKKLKSVKELLGITIMERSSFEKNPIDFLEAKGYKEVKKDLIIKLPKYSLFELENGRKRMLASAGELQKGNELALPSKYVNFLYLASHYEKLKGSPEDNEQKQLFVEQHKHYLDEIIEQISEFSKRVILADANLDKVLSAYNKHRDKPIREQAENIIHLFTLTNLGAPAAFKYFDTTIDRKRYTSTKEVLDATLIHQSITGLYETRIDLSQLGGDSGGSGGSGGSTNLSDIIEKETGKQLVIQESILMLPEEVEEVIGNKPESDILVHTAYDESTDENVMLLTSDAPEYKPWALVIQDSNGENKIKMLSGGSGGSGGSTNLSDIIEKETGKQLVIQESILMLPEEVEEVIGNKPESDILVHTAYDESTDENVMLLTSDAPEYKPWALVIQDSNGENKIKMLSGGSPKKKRKVKRTADGSEFEPKKKRKV

SEQ ID NO: 3207 - protein, 1829 aa, Artificial Sequence
  Synthetic
MKRTADGSEFESPKKKRKVEASPASGPRHLMDPHIFTSNFNNGIGRHKTYLCYEVERLDNGDAVKMDQHRGFLHGQAKNLLCGFYGRHAELRFLDLVPSLQLDPAQIYRVTWFISWSPCFSWGCAGEVRAFLQENTHVRLRIFAARIYDYDPLYKEALQMLRDAGAQVSIMTYDEFKHCWDTFVDHQGCPFQPWDGLDEHSQALSGRLRAILQNQGNSGGSSGGSSGSETPGTSESATPESSGGSSGGDKKYSIGLAIGTNSVGWAVITDEYKVPSKKFKVLGNTDRHSIKKNLIGALLFDSGETAEATRLKRTARRRYTRRKNRICYLQEIFSNEMAKVDDSFFHRLEESFLVEEDKKHERHPIFGNIVDEVAYHEKYPTIYHLRKKLVDSTDKADLRLIYLALAHMIKFRGHFLIEGDLNPDNSDVDKLFIQLVQTYNQLFEENPINASGVDAKAILSARLSKSRRLENLIAQLPGEKKNGLFGNLIALSLGLTPNFKSNFDLAEDAKLQLSKDTYDDDLDNLLAQIGDQYADLFLAAKNLSDAILLSDILRVNTEITKAPLSASMIKRYDEHHQDLTLLKALVRQQLPEKYKEIFFDQSKNGYAGYIDGGASQEEFYKFIKPILEKMDGTEELLVKLNREDLLRKQRTFDNGSIPHQIHLGELHAILRRQEDFYPFLKDNREKIEKILTFRIPYYVGPLARGNSRFAWMTRKSEETITPWNFEEVVDKGASAQSFIERMTNFDKNLPNEKVLPKHSLLYEYFTVYNELTKVKYVTEGMRKPAFLSGEQKKAIVDLLFKTNRKVTVKQLKEDYFKKIECFDSVEISGVEDRFNASLGTYHDLLKIIKDKDFLDNEENEDILEDIVLTLTLFEDREMIEERLKTYAHLFDDKVMKQLKRRRYTGWGRLSRKLINGIRDKQSGKTILDFLKSDGFANRNFMQLIHDDSLTFKEDIQKAQVSGQGDSLHEHIANLAGSPAIKKGILQTVKVVDELVKVMGRHKPENIVIEMARENQTTQKGQKNSRERMKRIEEGIKELGSQILKEHPVENTQLQNEKLYLYYLQNGRDMYVDQELDINRLSDYDVDHIVPQSFLKDDSIDNKVLTRSDKNRGKSDNVPSEEVVKKMKNYWRQLLNAKLITQRKFDNLTKAERGGLSELDKAGFIKRQLVETRQITKHVAQILDSRMNTKYDENDKLIREVKVITLKSKLVSDFRKDFQFYKVREINNYHHAHDAYLNAVVGTALIKKYPKLESEFVYGDYKVYDVRKMIAKSEQEIGKATAKYFFYSNIMNFFKTEITLANGEIRKRPLIETNGETGEIVWDKGRDFATVRKVLSMPQVNIVKKTEVQTGGFSKESILPKRNSDKLIARKKDWDPKKYGGFDSPTVAYSVLVVAKVEKGKSKKLKSVKELLGITIMERSSFEKNPIDFLEAKGYKEVKKDLIIKLPKYSLFELENGRKRMLASAGELQKGNELALPSKYVNFLYLASHYEKLKGSPEDNEQKQLFVEQHKHYLDEIIEQISEFSKRVILADANLDKVLSAYNKHRDKPIREQAENIIHLFTLTNLGAPAAFKYFDTTIDRKRYTSTKEVLDATLIHQSITGLYETRIDLSQLGGDSGGSGGSGGSTNLSDIIEKETGKQLVIQESILMLPEEVEEVIGNKPESDILVHTAYDESTDENVMLLTSDAPEYKPWALVIQDSNGENKIKMLSGGSGGSGGSTNLSDIIEKETGKQLVIQESILMLPEEVEEVIGNKPESDILVHTAYDESTDENVMLLTSDAPEYKPWALVIQDSNGENKIKMLSGGSPKKKRKVKRTADGSEFEPKKKRKV

SEQ ID NO: 3208 - protein, 1880 aa, Artificial Sequence
  Synthetic
MKRTADGSEFESPKKKRKVSSETGPVAVDPTLRRRIEPHEFEVFFDPRELRKETCLLYEINWGGRHSIWRHTSQNTNKHVEVNFIEKFTTERYFCPNTRCSITWFLSWSPCGECSRAITEFLSRYPHVTLFIYIARLYHHADPRNRQGLRDLISSGVTIQIMTEQESGYCWRNFVNYSPSNEAHWPRYPHLWVRLYVLELYCIILGLPPCLNILRRKQPQLTFFTIALQSCHYQRLPPHILWATGLKSGGSSGGSSGSETPGTSESATPESSGGSSGGEIGKATAKYFFYSNIMNFFKTEITLANGEIRKRPLIETNGETGEIVWDKGRDFATVRKVLSMPQVNIVKKTEVQTGGFSKESILPKRNSDKLIARKKDWDPKKYGGFDSPTVAYSVLVVAKVEKGKSKKLKSVKELLGITIMERSSFEKNPIDFLEAKGYKEVKKDLIIKLPKYSLFELENGRKRMLASAGELQKGNELALPSKYVNFLYLASHYEKLKGSPEDNEQKQLFVEQHKHYLDEIIEQISEFSKRVILADANLDKVLSAYNKHRDKPIREQAENIIHLFTLTNLGAPAAFKYFDTTIDRKRYTSTKEVLDATLIHQSITGLYETRIDLSQLGGDGGSGGSGGSGGSGGSGGSGGMDKKYSIGLAIGTNSVGWAVITDEYKVPSKKFKVLGNTDRHSIKKNLIGALLFDSGETAEATRLKRTARRRYTRRKNRICYLQEIFSNEMAKVDDSFFHRLEESFLVEEDKKHERHPIFGNIVDEVAYHEKYPTIYHLRKKLVDSTDKADLRLIYLALAHMIKFRGHFLIEGDLNPDNSDVDKLFIQLVQTYNQLFEENPINASGVDAKAILSARLSKSRRLENLIAQLPGEKKNGLFGNLIALSLGLTPNFKSNFDLAEDAKLQLSKDTYDDDLDNLLAQIGDQYADLFLAAKNLSDAILLSDILRVNTEITKAPLSASMIKRYDEHHQDLTLLKALVRQQLPEKYKEIFFDQSKNGYAGYIDGGASQEEFYKFIKPILEKMDGTEELLVKLNREDLLRKQRTFDNGSIPHQIHLGELHAILRRQEDFYPFLKDNREKIEKILTFRIPYYVGPLARGNSRFAWMTRKSEETITPWNFEEVVDKGASAQSFIERMTNFDKNLPNEKVLPKHSLLYEYFTVYNELTKVKYVTEGMRKPAFLSGEQKKAIVDLLFKTNRKVTVKQLKEDYFKKIECFDSVEISGVEDRFNASLGTYHDLLKIIKDKDFLDNEENEDILEDIVLTLTLFEDREMIEERLKTYAHLFDDKVMKQLKRRRYTGWGRLSRKLINGIRDKQSGKTILDFLKSDGFANRNFMQLIHDDSLTFKEDIQKAQVSGQGDSLHEHIANLAGSPAIKKGILQTVKVVDELVKVMGRHKPENIVIEMARENQTTQKGQKNSRERMKRIEEGIKELGSQILKEHPVENTQLQNEKLYLYYLQNGRDMYVDQELDINRLSDYDVDHIVPQSFLKDDSIDNKVLTRSDKNRGKSDNVPSEEVVKKMKNYWRQLLNAKLITQRKFDNLTKAERGGLSELDKAGFIKRQLVETRQITKHVAQILDSRMNTKYDENDKLIREVKVITLKSKLVSDFRKDFQFYKVREINNYHHAHDAYLNAVVGTALIKKYPKLESEFVYGDYKVYDVRKMIAKSEQSGGSGGSGGSTNLSDIIEKETGKQLVIQESILMLPEEVEEVIGNKPESDILVHTAYDESTDENVMLLTSDAPEYKPWALVIQDSNGENKIKMLSGGSGGSGGSTNLSDIIEKETGKQLVIQESILMLPEEVEEVIGNKPESDILVHTAYDESTDENVMLLTSDAPEYKPWALVIQDSNGENKIKMLSGGSPKKKRKVKRTADGSEFEPKKKRKV

SEQ ID NO: 3209 - protein, 1859 aa, Artificial Sequence
  Synthetic
MKRTADGSEFESPKKKRKVSSETGPVAVDPTLRRRIEPHEFEVFFDPRELRKETCLLYEINWGGRHSIWRHTSQNTNKHVEVNFIEKFTTERYFCPNTRCSITWFLSWSPCGECSRAITEFLSRYPHVTLFIYIARLYHHADPRNRQGLRDLISSGVTIQIMTEQESGYCWRNFVNYSPSNEAHWPRYPHLWVRLYVLELYCIILGLPPCLNILRRKQPQLTFFTIALQSCHYQRLPPHILWATGLKSGGSSGGSSGSETPGTSESATPESSGGSSGGDKKYSIGLAIGTNSVGWAVITDEYKVPSKKFKVLGNTDRHSIKKNLIGALLFDSGETAEATRLKRTARRRYTRRKNRICYLQEIFSNEMAKVDDSFFHRLEESFLVEEDKKHERHPIFGNIVDEVAYHEKYPTIYHLRKKLVDSTDKADLRLIYLALAHMIKFRGHFLIEGDLNPDNSDVDKLFIQLVQTYNQLFEENPINASGVDAKAILSARLSKSRRLENLIAQLPGEKKNGLFGNLIALSLGLTPNFKSNFDLAEDAKLQLSKDTYDDDLDNLLAQIGDQYADLFLAAKNLSDAILLSDILRVNTEITKAPLSASMIKRYDEHHQDLTLLKALVRQQLPEKYKEIFFDQSKNGYAGYIDGGASQEEFYKFIKPILEKMDGTEELLVKLNREDLLRKQRTFDNGSIPHQIHLGELHAILRRQEDFYPFLKDNREKIEKILTFRIPYYVGPLARGNSRFAWMTRKSEETITPWNFEEVVDKGASAQSFIERMTNFDKNLPNEKVLPKHSLLYEYFTVYNELTKVKYVTEGMRKPAFLSGEQKKAIVDLLFKTNRKVTVKQLKEDYFKKIECFDSVEISGVEDRFNASLGTYHDLLKIIKDKDFLDNEENEDILEDIVLTLTLFEDREMIEERLKTYAHLFDDKVMKQLKRRRYTGWGRLSRKLINGIRDKQSGKTILDFLKSDGFANRNFMQLIHDDSLTFKEDIQKAQVSGQGDSLHEHIANLAGSPAIKKGILQTVKVVDELVKVMGRHKPENIVIEMARENQTTQKGQKNSRERMKRIEEGIKELGSQILKEHPVENTQLQNEKLYLYYLQNGRDMYVDQELDINRLSDYDVDHIVPQSFLKDDSIDNKVLTRSDKNRGKSDNVPSEEVVKKMKNYWRQLLNAKLITQRKFDNLTKAERGGLSELDKAGFIKRQLVETRQITKHVAQILDSRMNTKYDENDKLIREVKVITLKSKLVSDFRKDFQFYKVREINNYHHAHDAYLNAVVGTALIKKYPKLESEFVYGDYKVYDVRKMIAKSEQEIGKATAKYFFYSNIMNFFKTEITLANGEIRKRPLIETNGETGEIVWDKGRDFATVRKVLSMPQVNIVKKTEVQTGGFSKESIRPKRNSDKLIARKKDWDPKKYGGFVSPTVAYSVLVVAKVEKGKSKKLKSVKELLGITIMERSSFEKNPIDFLEAKGYKEVKKDLIIKLPKYSLFELENGRKRMLASARFLQKGNELALPSKYVNFLYLASHYEKLKGSPEDNEQKQLFVEQHKHYLDEIIEQISEFSKRVILADANLDKVLSAYNKHRDKPIREQAENIIHLFTLTNLGAPRAFKYFDTTIDRKVYRSTKEVLDATLIHQSITGLYETRIDLSQLGGDSGGSGGSGGSTNLSDIIEKETGKQLVIQESILMLPEEVEEVIGNKPESDILVHTAYDESTDENVMLLTSDAPEYKPWALVIQDSNGENKIKMLSGGSGGSGGSTNLSDIIEKETGKQLVIQESILMLPEEVEEVIGNKPESDILVHTAYDESTDENVMLLTSDAPEYKPWALVIQDSNGENKIKMLSGGSPKKKRKVKRTADGSEFEPKKKRKV

SEQ ID NO: 3210 - protein, 1996 aa, Artificial Sequence
  Synthetic
MKRTADGSEFESPKKKRKVSEVEFSHEYWMRHALTLAKRAWDEREVPVGAVLVHNNRVIGEGWNRPIGRHDPTAHAEIMALRQGGLVMQNYRLIDATLYVTLEPCVMCAGAMIHSRIGRVVFGARDAKTGAAGSLMDVLHHPGMNHRVEITEGILADECAALLSDFFRMRRQEIKAQKKAQSSTDSGGSSGGSSGSETPGTSESATPESSGGSSGGSSEVEFSHEYWMRHALTLAKRARDEREVPVGAVLVLNNRVIGEGWNRAIGLHDPTAHAEIMALRQGGLVMQNYRLIDATLYVTFEPCVMCAGAMIHSRIGRVVFGVRNAKTGAAGSLMDVLHYPGMNHRVEITEGILADECAALLCYFFRMPRQVFNAQKKAQSSTDSGGSSGGSSGSETPGTSESATPESSGGSSGGSDKKYSIGLAIGTNSVGWAVITDEYKVPSKKFKVLGNTDRHSIKKNLIGALLFDSGETAEATRLKRTARRRYTRRKNRICYLQEIFSNEMAKVDDSFFHRLEESFLVEEDKKHERHPIFGNIVDEVAYHEKYPTIYHLRKKLVDSTDKADLRLIYLALAHMIKFRGHFLIEGDLNPDNSDVDKLFIQLVQTYNQLFEENPINASGVDAKAILSARLSKSRRLENLIAQLPGEKKNGLFGNLIALSLGLTPNFKSNFDLAEDAKLQLSKDTYDDDLDNLLAQIGDQYADLFLAAKNLSDAILLSDILRVNTEITKAPLSASMIKRYDEHHQDLTLLKALVRQQLPEKYKEIFFDQSKNGYAGYIDGGASQEEFYKFIKPILEKMDGTEELLVKLNREDLLRKQRTFDNGSIPHQIHLGELHAILRRQEDFYPFLKDNREKIEKILTFRIPYYVGPLARGNSRFAWMTRKSEETITPWNFEEVVDKGASAQSFIERMTNFDKNLPNEKVLPKHSLLYEYFTVYNELTKVKYVTEGMRKPAFLSGEQKKAIVDLLFKTNRKVTVKQLKEDYFKKIECFDSVEISGVEDRFNASLGTYHDLLKIIKDKDFLDNEENEDILEDIVLTLTLFEDREMIEERLKTYAHLFDDKVMKQLKRRRYTGWGRLSRKLINGIRDKQSGKTILDFLKSDGFANRNFMQLIHDDSLTFKEDIQKAQVSGQGDSLHEHIANLAGSPAIKKGILQTVKVVDELVKVMGRHKPENIVIEMARENQTTQKGQKNSRERMKRIEEGIKELGSQILKEHPVENTQLQNEKLYLYYLQNGRDMYVDQELDINRLSDYDVDHIVPQSFLKDDSIDNKVLTRSDKNRGKSDNVPSEEVVKKMKNYWRQLLNAKLITQRKFDNLTKAERGGLSELDKAGFIKRQLVETRQITKHVAQILDSRMNTKYDENDKLIREVKVITLKSKLVSDFRKDFQFYKVREINNYHHAHDAYLNAVVGTALIKKYPKLESEFVYGDYKVYDVRKMIAKSEQEIGKATAKYFFYSNIMNFFKTEITLANGEIRKRPLIETNGETGEIVWDKGRDFATVRKVLSMPQVNIVKKTEVQTGGFSKESILPKRNSDKLIARKKDWDPKKYGGFDSPTVAYSVLVVAKVEKGKSKKLKSVKELLGITIMERSSFEKNPIDFLEAKGYKEVKKDLIIKLPKYSLFELENGRKRMLASAGELQKGNELALPSKYVNFLYLASHYEKLKGSPEDNEQKQLFVEQHKHYLDEIIEQISEFSKRVILADANLDKVLSAYNKHRDKPIREQAENIIHLFTLTNLGAPAAFKYFDTTIDRKRYTSTKEVLDATLIHQSITGLYETRIDLSQLGGDSGGSGGSGGSTNLSDIIEKETGKQLVIQESILMLPEEVEEVIGNKPESDILVHTAYDESTDENVMLLTSDAPEYKPWALVIQDSNGENKIKMLSGGSGGSGGSTNLSDIIEKETGKQLVIQESILMLPEEVEEVIGNKPESDILVHTAYDESTDENVMLLTSDAPEYKPWALVIQDSNGENKIKMLSGGSPKKKRKVKRTADGSEFEPKKKRKV

SEQ ID NO: 3211 - protein, 2016 aa, Artificial Sequence
  Synthetic
MKRTADGSEFESPKKKRKVSEVEFSHEYWMRHALTLAKRAWDEREVPVGAVLVHNNRVIGEGWNRPIGRHDPTAHAEIMALRQGGLVMQNYRLIDATLYVTLEPCVMCAGAMIHSRIGRVVFGARDAKTGAAGSLMDVLHHPGMNHRVEITEGILADECAALLSDFFRMRRQEIKAQKKAQSSTDSGGSSGGSSGSETPGTSESATPESSGGSSGGSSEVEFSHEYWMRHALTLAKRARDEREVPVGAVLVLNNRVIGEGWNRAIGLHDPTAHAEIMALRQGGLVMQNYRLIDATLYVTFEPCVMCAGAMIHSRIGRVVFGVRNAKTGAAGSLMDVLHYPGMNHRVEITEGILADECAALLCYFFRMPRQVFNAQKKAQSSTDSGGSSGGSSGSETPGTSESATPESSGGSSGGSNIMNFFKTEITLANGEIRKRPLIETNGETGEIVWDKGRDFATVRKVLSMPQVNIVKKTEVQTGGFSKESILPKRNSDKLIARKKDWDPKKYGGFDSPTVAYSVLVVAKVEKGKSKKLKSVKELLGITIMERSSFEKNPIDFLEAKGYKEVKKDLIIKLPKYSLFELENGRKRMLASAGELQKGNELALPSKYVNFLYLASHYEKLKGSPEDNEQKQLFVEQHKHYLDEIIEQISEFSKRVILADANLDKVLSAYNKHRDKPIREQAENIIHLFTLTNLGAPAAFKYFDTTIDRKRYTSTKEVLDATLIHQSITGLYETRIDLSQLGGDGGSGGSGGSGGSGGSGGSGGDKKYSIGLAIGTNSVGWAVITDEYKVPSKKFKVLGNTDRHSIKKNLIGALLFDSGETAEATRLKRTARRRYTRRKNRICYLQEIFSNEMAKVDDSFFHRLEESFLVEEDKKHERHPIFGNIVDEVAYHEKYPTIYHLRKKLVDSTDKADLRLIYLALAHMIKFRGHFLIEGDLNPDNSDVDKLFIQLVQTYNQLFEENPINASGVDAKAILSARLSKSRRLENLIAQLPGEKKNGLFGNLIALSLGLTPNFKSNFDLAEDAKLQLSKDTYDDDLDNLLAQIGDQYADLFLAAKNLSDAILLSDILRVNTEITKAPLSASMIKRYDEHHQDLTLLKALVRQQLPEKYKEIFFDQSKNGYAGYIDGGASQEEFYKFIKPILEKMDGTEELLVKLNREDLLRKQRTFDNGSIPHQIHLGELHAILRRQEDFYPFLKDNREKIEKILTFRIPYYVGPLARGNSRFAWMTRKSEETITPWNFEEVVDKGASAQSFIERMTNFDKNLPNEKVLPKHSLLYEYFTVYNELTKVKYVTEGMRKPAFLSGEQKKAIVDLLFKTNRKVTVKQLKEDYFKKIECFDSVEISGVEDRFNASLGTYHDLLKIIKDKDFLDNEENEDILEDIVLTLTLFEDREMIEERLKTYAHLFDDKVMKQLKRRRYTGWGRLSRKLINGIRDKQSGKTILDFLKSDGFANRNFMQLIHDDSLTFKEDIQKAQVSGQGDSLHEHIANLAGSPAIKKGILQTVKVVDELVKVMGRHKPENIVIEMARENQTTQKGQKNSRERMKRIEEGIKELGSQILKEHPVENTQLQNEKLYLYYLQNGRDMYVDQELDINRLSDYDVDHIVPQSFLKDDSIDNKVLTRSDKNRGKSDNVPSEEVVKKMKNYWRQLLNAKLITQRKFDNLTKAERGGLSELDKAGFIKRQLVETRQITKHVAQILDSRMNTKYDENDKLIREVKVITLKSKLVSDFRKDFQFYKVREINNYHHAHDAYLNAVVGTALIKKYPKLESEFVYGDYKVYDVRKMIAKSEQEIGKATAKYFFYSSGGSGGSGGSTNLSDIIEKETGKQLVIQESILMLPEEVEEVIGNKPESDILVHTAYDESTDENVMLLTSDAPEYKPWALVIQDSNGENKIKMLSGGSGGSGGSTNLSDIIEKETGKQLVIQESILMLPEEVEEVIGNKPESDILVHTAYDESTDENVMLLTSDAPEYKPWALVIQDSNGENKIKMLSGGSPKKKRKVKRTADGSEFEPKKKRKV

SEQ ID NO: 3212 - skipped

SEQ ID NO: 3213 - DNA, 100 bp, Artificial Sequence
  Synthetic
gagtcctagagtgttatctttaggcacgatacaggtacatgaatccgctcatctaggtgacctactcctgccctggtagcagccttaatgacgatcgttg

SEQ ID NO: 3214 - DNA, 20 bp, Artificial Sequence
  Synthetic
gcacgatacaggtacatgaa

SEQ ID NO: 3215 - DNA, 22 bp, Artificial Sequence
  Synthetic
tatagcatatttattacatcgg

SEQ ID NO: 3216 - DNA, 23 bp, Artificial Sequence
  Synthetic
ccgtcatgtgggtcctgaattgg

SEQ ID NO: 3217 - DNA, 23 bp, Artificial Sequence
  Synthetic
acactgaaagactccaggtcagg

SEQ ID NO: 3218 - DNA, 23 bp, Artificial Sequence
  Synthetic
tttaaagtgaagcagcatctggg

SEQ ID NO: 3219 - DNA, 23 bp, Artificial Sequence
  Synthetic
atttaaagtgaagcagcatctgg

SEQ ID NO: 3220 - DNA, 23 bp, Artificial Sequence
  Synthetic
actccatgacagtgtaattttgg

SEQ ID NO: 3221 - DNA, 23 bp, Artificial Sequence
  Synthetic
gcctggagaagccatccagcagg

SEQ ID NO: 3222 - DNA, 23 bp, Artificial Sequence
  Synthetic
ctcagacacactcattgatgagg

SEQ ID NO: 3223 - DNA, 24 bp, Artificial Sequence
  Synthetic
gaggcactgcccccaccatgagcg

SEQ ID NO: 3224 - DNA, 20 bp, Artificial Sequence
  Synthetic
caccgtggtttacaccgaca

SEQ ID NO: 3225 - DNA, 20 bp, Artificial Sequence
  Synthetic
cttccatgggggccatgagg

SEQ ID NO: 3226 - DNA, 20 bp, Artificial Sequence
  Synthetic
gtgtgacactgatatccgca

SEQ ID NO: 3227 - DNA, 20 bp, Artificial Sequence
  Synthetic
ctacccgttaaagaatcatc

SEQ ID NO: 3228 - DNA, 20 bp, Artificial Sequence
  Synthetic
tgtagcaggtgaagatgatc

SEQ ID NO: 3229 - DNA, 20 bp, Artificial Sequence
  Synthetic
cttgcgttatgatggattca

SEQ ID NO: 3230 - DNA, 20 bp, Artificial Sequence
  Synthetic
gaatttgccggtgaccgggg

SEQ ID NO: 3231 - DNA, 20 bp, Artificial Sequence
  Synthetic
atgtgacggaagaggttgaa

SEQ ID NO: 3232 - DNA, 20 bp, Artificial Sequence
  Synthetic
ggagcaggggctcagcaggg

SEQ ID NO: 3233 - DNA, 20 bp, Artificial Sequence
  Synthetic
caaggatccggaggaggtga

SEQ ID NO: 3234 - DNA, 20 bp, Artificial Sequence
  Synthetic
atgtcggaggcttggaactc

SEQ ID NO: 3235 - DNA, 20 bp, Artificial Sequence
  Synthetic
gaggttccttgagtcctttg

SEQ ID NO: 3236 - DNA, 20 bp, Artificial Sequence
  Synthetic
tgaacgcagattcttgttct

SEQ ID NO: 3237 - DNA, 20 bp, Artificial Sequence
  Synthetic
gttcactgatagcaggaagg

SEQ ID NO: 3238 - protein, 171 aa, Streptococcus pyogenes
MPYSLEEQTYFMQEALKEAEKSLQKAEIPIGCVIVKDGEIIGRGHNAREESNQAIMHAEIMAINEANAHEGNWRLLDTTLFVTIEPCVMCSGAIGLARIPHVIYGASNQKFGGADSLYQILTDERLNHRVQVERGLLAADCANIMQTFFRQGRERKKIAKHLIKEQSDPFD

SEQ ID NO: 3239 - protein, 1605 aa, Artificial Sequence
  Synthetic
MKRTADGSEFESPKKKRKVSEVEFSHEYWMRHALTLAKRARDEREVPVGAVLVLNNRVIGEGWNRAIGLHDPTAHAEIMALRQGGLVMQNYRLIDATLYVTFEPCVMCAGAMIHSRIGRVVFGWRNSKRGAAGSLMNVLNYPGMNHRVEITEGILADECAALLCDFYRMPRQVFNAQKKAQSSINSGGSSGGSSGSETPGTSESATPESSGGSSGGSDKKYSIGLAIGTNSVGWAVITDEYKVPSKKFKVLGNTDRHSIKKNLIGALLFDSGETAEATRLKRTARRRYTRRKNRICYLQEIFSNEMAKVDDSFFHRLEESFLVEEDKKHERHPIFGNIVDEVAYHEKYPTIYHLRKKLVDSTDKADLRLIYLALAHMIKFRGHFLIEGDLNPDNSDVDKLFIQLVQTYNQLFEENPINASGVDAKAILSARLSKSRRLENLIAQLPGEKKNGLFGNLIALSLGLTPNFKSNFDLAEDAKLQLSKDTYDDDLDNLLAQIGDQYADLFLAAKNLSDAILLSDILRVNTEITKAPLSASMIKRYDEHHQDLTLLKALVRQQLPEKYKEIFFDQSKNGYAGYIDGGASQEEFYKFIKPILEKMDGTEELLVKLNREDLLRKQRTFDNGSIPHQIHLGELHAILRRQEDFYPFLKDNREKIEKILTFRIPYYVGPLARGNSRFAWMTRKSEETITPWNFEEVVDKGASAQSFIERMTNFDKNLPNEKVLPKHSLLYEYFTVYNELTKVKYVTEGMRKPAFLSGEQKKAIVDLLFKTNRKVTVKQLKEDYFKKIECFDSVEISGVEDRFNASLGTYHDLLKIIKDKDFLDNEENEDILEDIVLTLTLFEDREMIEERLKTYAHLFDDKVMKQLKRRRYTGWGRLSRKLINGIRDKQSGKTILDFLKSDGFANRNFMQLIHDDSLTFKEDIQKAQVSGQGDSLHEHIANLAGSPAIKKGILQTVKVVDELVKVMGRHKPENIVIEMARENQTTQKGQKNSRERMKRIEEGIKELGSQILKEHPVENTQLQNEKLYLYYLQNGRDMYVDQELDINRLSDYDVDHIVPQSFLKDDSIDNKVLTRSDKNRGKSDNVPSEEVVKKMKNYWRQLLNAKLITQRKFDNLTKAERGGLSELDKAGFIKRQLVETRQITKHVAQILDSRMNTKYDENDKLIREVKVITLKSKLVSDFRKDFQFYKVREINNYHHAHDAYLNAVVGTALIKKYPKLESEFVYGDYKVYDVRKMIAKSEQEIGKATAKYFFYSNIMNFFKTEITLANGEIRKRPLIETNGETGEIVWDKGRDFATVRKVLSMPQVNIVKKTEVQTGGFSKESILPKRNSDKLIARKKDWDPKKYGGFDSPTVAYSVLVVAKVEKGKSKKLKSVKELLGITIMERSSFEKNPIDFLEAKGYKEVKKDLIIKLPKYSLFELENGRKRMLASAGELQKGNELALPSKYVNFLYLASHYEKLKGSPEDNEQKQLFVEQHKHYLDEIIEQISEFSKRVILADANLDKVLSAYNKHRDKPIREQAENIIHLFTLTNLGAPAAFKYFDTTIDRKRYTSTKEVLDATLIHQSITGLYETRIDLSQLGGDSGGSKRTADGSEFEPKKKRKV

SEQ ID NO: 3240 - protein, 1803 aa, Artificial Sequence
  Synthetic
MKRTADGSEFESPKKKRKVSEVEFSHEYWMRHALTLAKRAWDEREVPVGAVLVHNNRVIGEGWNRPIGRHDPTAHAEIMALRQGGLVMQNYRLIDATLYVTLEPCVMCAGAMIHSRIGRVVFGARDAKTGAAGSLMDVLHHPGMNHRVEITEGILADECAALLSDFFRMRRQEIKAQKKAQSSTDSGGSSGGSSGSETPGTSESATPESSGGSSGGSSEVEFSHEYWMRHALTLAKRARDEREVPVGAVLVLNNRVIGEGWNRAIGLHDPTAHAEIMALRQGGLVMQNYRLIDATLYVTFEPCVMCAGAMIHSRIGRVVFGVRNSKRGAAGSLMNVLNYPGMNHRVEITEGILADECAALLCDFYRMPRQVFNAQKKAQSSINSGGSSGGSSGSETPGTSESATPESSGGSSGGSDKKYSIGLAIGTNSVGWAVITDEYKVPSKKFKVLGNTDRHSIKKNLIGALLFDSGETAEATRLKRTARRRYTRRKNRICYLQEIFSNEMAKVDDSFFHRLEESFLVEEDKKHERHPIFGNIVDEVAYHEKYPTIYHLRKKLVDSTDKADLRLIYLALAHMIKFRGHFLIEGDLNPDNSDVDKLFIQLVQTYNQLFEENPINASGVDAKAILSARLSKSRRLENLIAQLPGEKKNGLFGNLIALSLGLTPNFKSNFDLAEDAKLQLSKDTYDDDLDNLLAQIGDQYADLFLAAKNLSDAILLSDILRVNTEITKAPLSASMVKRYDEHHQDLTLLKALVRQQLPEKYKEIFFDQSKNGYAGYIDGGASQEEFYKFIKPILEKMDGTEELLVKLNREDLLRKQRTFDNGIIPHQIHLGELHAILRRQGDFYPFLKDNREKIEKILTFRIPYYVGPLARGNSRFAWMTRKSEETITPWNFEEVVDKGASAQSFIERMTNFDKNLPNEKVLPKHSLLYEYFTVYNELTKVKYVTEGMRKPAFLSGEQKKAIVDLLFKTNRKVTVKQLKEDYFKKIECFDSVEISGVEDRFNASLGTYHDLLKIIKDKDFLDNEENEDILEDIVLTLTLFEDREMIEERLKTYAHLFDDKVMKQLKRLRYTGWGRLSRKLINGIRDKQSGKTILDFLKSDGFANRNFMQLIHDDSLTFKEDIQKAQVSCQGDSLHEHIANLAGSPAIKKGILQTVKVVDELIKVMGGHKPENIVIEMARENQTTQKGQKNSRERMKRIEEGIKELGSQILKEHPVENTQLQNEKLYLYYLQNGRDMYVDQELDINRLSDYDVDHIVPQSFLKDDSIENKVLTRSDKNRGKSDNVPSEEVVKKMKNYWRQLLNAKLITQRKFDNLTKAERGGLSELDKAGFIKRQLAETRQITKHVAQILDSRMNTKYDENDKLIREVKVITLKSKLVSDFRKDFQFYKVREINNYHHAHDAYLNAVVGTALIKKYPKLESEFVYGDYKVYDVRKMIAKSEQEIGKATAKYFFYSNIMNFFKTEITLANGEIRKRPLIETNGETGEIVWDKGRDFATVRKVLSMPQVNIVKKTEVQTGGFSKESILPKGNSDKLIARKKDWDPKKYGGFNSPTVAYSVLVVAKVEKGKSKKLKSVKELLGITIMERSSFEKNPIGFLEAKGYKEVKKDLIIKLPKYSLFELENGRKRMLASASVLHKGNELALPSKYVNFLYLASHYEKLKGSSEDNKQKQLFVEQHKHYLDEIIEQISEFSKRVILADANLDKVLSAYNKHRDKPIREQAENIIHLFTLTNLGASAAFKYFDTTIGRKLYTSTKEVLDATLIHQSITGLYETRIDLSQLGGDSGGSKRTADGSEFEPKKKRKV

SEQ ID NO: 3241 - protein, 1605 aa, Artificial Sequence
  Synthetic
MKRTADGSEFESPKKKRKVSEVEFSHEYWMRHALTLAKRARDEREVPVGAVLVLNNRVIGEGWNRAIGLHDPTAHAEIMALRQGGLVMQNYRLIDATLYVTFEPCVMCAGAMIHSRIGRVVFGVRNSKRGAAGSLMNVLNYPGMNHRVEITEGILADECAALLCDFYRMPRQVFNAQKKAQSSINSGGSSGGSSGSETPGTSESATPESSGGSSGGSDKKYSIGLAIGTNSVGWAVITDEYKVPSKKFKVLGNTDRHSIKKNLIGALLFDSGETAEATRLKRTARRRYTRRKNRICYLQEIFSNEMAKVDDSFFHRLEESFLVEEDKKHERHPIFGNIVDEVAYHEKYPTIYHLRKKLVDSTDKADLRLIYLALAHMIKFRGHFLIEGDLNPDNSDVDKLFIQLVQTYNQLFEENPINASGVDAKAILSARLSKSRRLENLIAQLPGEKKNGLFGNLIALSLGLTPNFKSNFDLAEDAKLQLSKDTYDDDLDNLLAQIGDQYADLFLAAKNLSDAILLSDILRVNTEITKAPLSASMVKRYDEHHQDLTLLKALVRQQLPEKYKEIFFDQSKNGYAGYIDGGASQEEFYKFIKPILEKMDGTEELLVKLNREDLLRKQRTFDNGIIPHQIHLGELHAILRRQGDFYPFLKDNREKIEKILTFRIPYYVGPLARGNSRFAWMTRKSEETITPWNFEEVVDKGASAQSFIERMTNFDKNLPNEKVLPKHSLLYEYFTVYNELTKVKYVTEGMRKPAFLSGEQKKAIVDLLFKTNRKVTVKQLKEDYFKKIECFDSVEISGVEDRFNASLGTYHDLLKIIKDKDFLDNEENEDILEDIVLTLTLFEDREMIEERLKTYAHLFDDKVMKQLKRLRYTGWGRLSRKLINGIRDKQSGKTILDFLKSDGFANRNFMQLIHDDSLTFKEDIQKAQVSCQGDSLHEHIANLAGSPAIKKGILQTVKVVDELIKVMGGHKPENIVIEMARENQTTQKGQKNSRERMKRIEEGIKELGSQILKEHPVENTQLQNEKLYLYYLQNGRDMYVDQELDINRLSDYDVDHIVPQSFLKDDSIENKVLTRSDKNRGKSDNVPSEEVVKKMKNYWRQLLNAKLITQRKFDNLTKAERGGLSELDKAGFIKRQLAETRQITKHVAQILDSRMNTKYDENDKLIREVKVITLKSKLVSDFRKDFQFYKVREINNYHHAHDAYLNAVVGTALIKKYPKLESEFVYGDYKVYDVRKMIAKSEQEIGKATAKYFFYSNIMNFFKTEITLANGEIRKRPLIETNGETGEIVWDKGRDFATVRKVLSMPQVNIVKKTEVQTGGFSKESILPKGNSDKLIARKKDWDPKKYGGFNSPTVAYSVLVVAKVEKGKSKKLKSVKELLGITIMERSSFEKNPIGFLEAKGYKEVKKDLIIKLPKYSLFELENGRKRMLASASVLHKGNELALPSKYVNFLYLASHYEKLKGSSEDNKQKQLFVEQHKHYLDEIIEQISEFSKRVILADANLDKVLSAYNKHRDKPIREQAENIIHLFTLTNLGASAAFKYFDTTIGRKLYTSTKEVLDATLIHQSITGLYETRIDLSQLGGDSGGSKRTADGSEFEPKKKRKV

SEQ ID NO: 3242 - protein, 1795 aa, Artificial Sequence
  Synthetic
MKRTADGSEFESPKKKRKVSEVEFSHEYWMRHALTLAKRAWDEREVPVGAVLVHNNRVIGEGWNRPIGRHDPTAHAEIMALRQGGLVMQNYRLIDATLYVTLEPCVMCAGAMIHSRIGRVVFGARDAKTGAAGSLMDVLHHPGMNHRVEITEGILADECAALLSDFFRMRRQEIKAQKKAQSSTDSGGSSGGSSGSETPGTSESATPESSGGSSGGSSEVEFSHEYWMRHALTLAKRARDEREVPVGAVLVLNNRVIGEGWNRAIGLHDPTAHAEIMALRQGGLVMQNYRLIDATLYVTFEPCVMCAGAMIHSRIGRVVFGVRNSKRGAAGSLMNVLNYPGMNHRVEITEGILADECAALLCDFYRMPRQVFNAQKKAQSSINSGGSSGGSSGSETPGTSESATPESSGGSSGGSDKKYSIGLAIGTNSVGWAVITDEYKVPSKKFKVLGNTDRHSIKKNLIGALLFDSGETAEATRLKRTARRRYTRRKNRICYLQEIFSNEMAKVDDSFFHRLEESFLVEEDKKHERHPIFGNIVDEVAYHEKYPTIYHLRKKLVDSTDKADLRLIYLALAHMIKFRGHFLIEGDLNPDNSDVDKLFIQLVQTYNQLFEENPINASGVDAKAILSARLSKSRRLENLIAQLPGEKKNGLFGNLIALSLGLTPNFKSNFDLAEDAKLQLSKDTYDDDLDNLLAQIGDQYADLFLAAKNLSDAILLSDILRVNTEITKAPLSASMIKRYDEHHQDLTLLKALVRQQLPEKYKEIFFDQSKNGYAGYIDGGASQEEFYKFIKPILEKMDGTEELLVKLNREDLLRKQRTFDNGSIPHQIHLGELHAILRRQEDFYPFLKDNREKIEKILTFRIPYYVGPLARGNSRFAWMTRKSEETITPWNFEEVVDKGASAQSFIERMTNFDKNLPNEKVLPKHSLLYEYFTVYNELTKVKYVTEGMRKPAFLSGEQKKAIVDLLFKTNRKVTVKQLKEDYFKKIECFDSVEISGVEDRFNASLGTYHDLLKIIKDKDFLDNEENEDILEDIVLTLTLFEDREMIEERLKTYAHLFDDKVMKQLKRRRYTGWGRLSRKLINGIRDKQSGKTILDFLKSDGFANRNFMQLIHDDSLTFKEDIQKAQVSGQGDSLHEHIANLAGSPAIKKGILQTVKVVDELVKVMGRHKPENIVIEMARENQTTQKGQKNSRERMKRIEEGIKELGSQILKEHPVENTQLQNEKLYLYYLQNGRDMYVDQELDINRLSDYDVDHIVPQSFLKDDSIDNKVLTRSDKNRGKSDNVPSEEVVKKMKNYWRQLLNAKLITQRKFDNLTKAERGGLSELDKAGFIKRQLVETRQITKHVAQILDSRMNTKYDENDKLIREVKVITLKSKLVSDFRKDFQFYKVREINNYHHAHDAYLNAVVGTALIKKYPKLESEFVYGDYKVYDVRKMIAKSEQEIGKATAKYFFYSNIMNFFKTEITLANGEIRKRPLIETNGETGEIVWDKGRDFATVRKVLSMPQVNIVKKTEIQTVGQNGGLFDDNPKSPLEVTPSKLVPLKKELNPKKYGGYQKPTTAYPVLLITDTKQLIPISVMNKKQFEQNPVKFLRDRGYQQVGKNDFIKLPKYTLVDIGDGIKRLWASSKEIHKGNQLVVSKKSQILLYHAHHLDSDLSNDYLQNHNQQFDVLFNEIISFSKKCKLGKEHIQKIENVYSNKKNSASIEELAESFIKLLGFTQLGATSPFNFLGVKLNQKQYKGKKDYILPCTEGTLIRQSITGLYETRVDLSKIGEDSGGSKRTADGSEFEPKKKRKV

SEQ ID NO: 3243 - protein, 1597 aa, Artificial Sequence
  Synthetic
MKRTADGSEFESPKKKRKVSEVEFSHEYWMRHALTLAKRARDEREVPVGAVLVLNNRVIGEGWNRAIGLHDPTAHAEIMALRQGGLVMQNYRLIDATLYVTFEPCVMCAGAMIHSRIGRVVFGVRNSKRGAAGSLMNVLNYPGMNHRVEITEGILADECAALLCDFYRMPRQVFNAQKKAQSSINSGGSSGGSSGSETPGTSESATPESSGGSSGGSDKKYSIGLAIGTNSVGWAVITDEYKVPSKKFKVLGNTDRHSIKKNLIGALLFDSGETAEATRLKRTARRRYTRRKNRICYLQEIFSNEMAKVDDSFFHRLEESFLVEEDKKHERHPIFGNIVDEVAYHEKYPTIYHLRKKLVDSTDKADLRLIYLALAHMIKFRGHFLIEGDLNPDNSDVDKLFIQLVQTYNQLFEENPINASGVDAKAILSARLSKSRRLENLIAQLPGEKKNGLFGNLIALSLGLTPNFKSNFDLAEDAKLQLSKDTYDDDLDNLLAQIGDQYADLFLAAKNLSDAILLSDILRVNTEITKAPLSASMIKRYDEHHQDLTLLKALVRQQLPEKYKEIFFDQSKNGYAGYIDGGASQEEFYKFIKPILEKMDGTEELLVKLNREDLLRKQRTFDNGSIPHQIHLGELHAILRRQEDFYPFLKDNREKIEKILTFRIPYYVGPLARGNSRFAWMTRKSEETITPWNFEEVVDKGASAQSFIERMTNFDKNLPNEKVLPKHSLLYEYFTVYNELTKVKYVTEGMRKPAFLSGEQKKAIVDLLFKTNRKVTVKQLKEDYFKKIECFDSVEISGVEDRFNASLGTYHDLLKIIKDKDFLDNEENEDILEDIVLTLTLFEDREMIEERLKTYAHLFDDKVMKQLKRRRYTGWGRLSRKLINGIRDKQSGKTILDFLKSDGFANRNFMQLIHDDSLTFKEDIQKAQVSGQGDSLHEHIANLAGSPAIKKGILQTVKVVDELVKVMGRHKPENIVIEMARENQTTQKGQKNSRERMKRIEEGIKELGSQILKEHPVENTQLQNEKLYLYYLQNGRDMYVDQELDINRLSDYDVDHIVPQSFLKDDSIDNKVLTRSDKNRGKSDNVPSEEVVKKMKNYWRQLLNAKLITQRKFDNLTKAERGGLSELDKAGFIKRQLVETRQITKHVAQILDSRMNTKYDENDKLIREVKVITLKSKLVSDFRKDFQFYKVREINNYHHAHDAYLNAVVGTALIKKYPKLESEFVYGDYKVYDVRKMIAKSEQEIGKATAKYFFYSNIMNFFKTEITLANGEIRKRPLIETNGETGEIVWDKGRDFATVRKVLSMPQVNIVKKTEIQTVGQNGGLFDDNPKSPLEVTPSKLVPLKKELNPKKYGGYQKPTTAYPVLLITDTKQLIPISVMNKKQFEQNPVKFLRDRGYQQVGKNDFIKLPKYTLVDIGDGIKRLWASSKEIHKGNQLVVSKKSQILLYHAHHLDSDLSNDYLQNHNQQFDVLFNEIISFSKKCKLGKEHIQKIENVYSNKKNSASIEELAESFIKLLGFTQLGATSPFNFLGVKLNQKQYKGKKDYILPCTEGTLIRQSITGLYETRVDLSKIGEDSGGSKRTADGSEFEPKKKRKV

SEQ ID NO: 3244 - protein, 1823 aa, Artificial Sequence
  Synthetic
MKRTADGSEFESPKKKRKVSEVEFSHEYWMRHALTLAKRAWDEREVPVGAVLVHNNRVIGEGWNRPIGRHDPTAHAEIMALRQGGLVMQNYRLIDATLYVTLEPCVMCAGAMIHSRIGRVVFGARDAKTGAAGSLMDVLHHPGMNHRVEITEGILADECAALLSDFFRMRRQEIKAQKKAQSSTDSGGSSGGSSGSETPGTSESATPESSGGSSGGSSEVEFSHEYWMRHALTLAKRARDEREVPVGAVLVLNNRVIGEGWNRAIGLHDPTAHAEIMALRQGGLVMQNYRLIDATLYVTFEPCVMCAGAMIHSRIGRVVFGVRNSKRGAAGSLMNVLNYPGMNHRVEITEGILADECAALLCDFYRMPRQVFNAQKKAQSSINSGGSSGGSSGSETPGTSESATPESSGGSSGGSNIMNFFKTEITLANGEIRKRPLIETNGETGEIVWDKGRDFATVRKVLSMPQVNIVKKTEVQTGGFSKESIRPKRNSDKLIARKKDWDPKKYGGFVSPTVAYSVLVVAKVEKGKSKKLKSVKELLGITIMERSSFEKNPIDFLEAKGYKEVKKDLIIKLPKYSLFELENGRKRMLASARFLQKGNELALPSKYVNFLYLASHYEKLKGSPEDNEQKQLFVEQHKHYLDEIIEQISEFSKRVILADANLDKVLSAYNKHRDKPIREQAENIIHLFTLTNLGAPRAFKYFDTTIDRKVYRSTKEVLDATLIHQSITGLYETRIDLSQLGGDGGSGGSGGSGGSGGSGGSGGDKKYSIGLAIGTNSVGWAVITDEYKVPSKKFKVLGNTDRHSIKKNLIGALLFDSGETAEATRLKRTARRRYTRRKNRICYLQEIFSNEMAKVDDSFFHRLEESFLVEEDKKHERHPIFGNIVDEVAYHEKYPTIYHLRKKLVDSTDKADLRLIYLALAHMIKFRGHFLIEGDLNPDNSDVDKLFIQLVQTYNQLFEENPINASGVDAKAILSARLSKSRRLENLIAQLPGEKKNGLFGNLIALSLGLTPNFKSNFDLAEDAKLQLSKDTYDDDLDNLLAQIGDQYADLFLAAKNLSDAILLSDILRVNTEITKAPLSASMIKRYDEHHQDLTLLKALVRQQLPEKYKEIFFDQSKNGYAGYIDGGASQEEFYKFIKPILEKMDGTEELLVKLNREDLLRKQRTFDNGSIPHQIHLGELHAILRRQEDFYPFLKDNREKIEKILTFRIPYYVGPLARGNSRFAWMTRKSEETITPWNFEEVVDKGASAQSFIERMTNFDKNLPNEKVLPKHSLLYEYFTVYNELTKVKYVTEGMRKPAFLSGEQKKAIVDLLFKTNRKVTVKQLKEDYFKKIECFDSVEISGVEDRFNASLGTYHDLLKIIKDKDFLDNEENEDILEDIVLTLTLFEDREMIEERLKTYAHLFDDKVMKQLKRRRYTGWGRLSRKLINGIRDKQSGKTILDFLKSDGFANRNFMQLIHDDSLTFKEDIQKAQVSGQGDSLHEHIANLAGSPAIKKGILQTVKVVDELVKVMGRHKPENIVIEMARENQTTQKGQKNSRERMKRIEEGIKELGSQILKEHPVENTQLQNEKLYLYYLQNGRDMYVDQELDINRLSDYDVDHIVPQSFLKDDSIDNKVLTRSDKNRGKSDNVPSEEVVKKMKNYWRQLLNAKLITQRKFDNLTKAERGGLSELDKAGFIKRQLVETRQITKHVAQILDSRMNTKYDENDKLIREVKVITLKSKLVSDFRKDFQFYKVREINNYHHAHDAYLNAVVGTALIKKYPKLESEFVYGDYKVYDVRKMIAKSEQEIGKATAKYFFYSSGGSKRTADGSEFEPKKKRKV

SEQ ID NO: 3245 - protein, 1625 aa, Artificial Sequence
  Synthetic
MKRTADGSEFESPKKKRKVSEVEFSHEYWMRHALTLAKRARDEREVPVGAVLVLNNRVIGEGWNRAIGLHDPTAHAEIMALRQGGLVMQNYRLIDATLYVTFEPCVMCAGAMIHSRIGRVVFGVRNSKRGAAGSLMNVLNYPGMNHRVEITEGILADECAALLCDFYRMPRQVFNAQKKAQSSINSGGSSGGSSGSETPGTSESATPESSGGSSGGSNIMNFFKTEITLANGEIRKRPLIETNGETGEIVWDKGRDFATVRKVLSMPQVNIVKKTEVQTGGFSKESIRPKRNSDKLIARKKDWDPKKYGGFVSPTVAYSVLVVAKVEKGKSKKLKSVKELLGITIMERSSFEKNPIDFLEAKGYKEVKKDLIIKLPKYSLFELENGRKRMLASARFLQKGNELALPSKYVNFLYLASHYEKLKGSPEDNEQKQLFVEQHKHYLDEIIEQISEFSKRVILADANLDKVLSAYNKHRDKPIREQAENIIHLFTLTNLGAPRAFKYFDTTIDRKVYRSTKEVLDATLIHQSITGLYETRIDLSQLGGDGGSGGSGGSGGSGGSGGSGGDKKYSIGLAIGTNSVGWAVITDEYKVPSKKFKVLGNTDRHSIKKNLIGALLFDSGETAEATRLKRTARRRYTRRKNRICYLQEIFSNEMAKVDDSFFHRLEESFLVEEDKKHERHPIFGNIVDEVAYHEKYPTIYHLRKKLVDSTDKADLRLIYLALAHMIKFRGHFLIEGDLNPDNSDVDKLFIQLVQTYNQLFEENPINASGVDAKAILSARLSKSRRLENLIAQLPGEKKNGLFGNLIALSLGLTPNFKSNFDLAEDAKLQLSKDTYDDDLDNLLAQIGDQYADLFLAAKNLSDAILLSDILRVNTEITKAPLSASMIKRYDEHHQDLTLLKALVRQQLPEKYKEIFFDQSKNGYAGYIDGGASQEEFYKFIKPILEKMDGTEELLVKLNREDLLRKQRTFDNGSIPHQIHLGELHAILRRQEDFYPFLKDNREKIEKILTFRIPYYVGPLARGNSRFAWMTRKSEETITPWNFEEVVDKGASAQSFIERMTNFDKNLPNEKVLPKHSLLYEYFTVYNELTKVKYVTEGMRKPAFLSGEQKKAIVDLLFKTNRKVTVKQLKEDYFKKIECFDSVEISGVEDRFNASLGTYHDLLKIIKDKDFLDNEENEDILEDIVLTLTLFEDREMIEERLKTYAHLFDDKVMKQLKRRRYTGWGRLSRKLINGIRDKQSGKTILDFLKSDGFANRNFMQLIHDDSLTFKEDIQKAQVSGQGDSLHEHIANLAGSPAIKKGILQTVKVVDELVKVMGRHKPENIVIEMARENQTTQKGQKNSRERMKRIEEGIKELGSQILKEHPVENTQLQNEKLYLYYLQNGRDMYVDQELDINRLSDYDVDHIVPQSFLKDDSIDNKVLTRSDKNRGKSDNVPSEEVVKKMKNYWRQLLNAKLITQRKFDNLTKAERGGLSELDKAGFIKRQLVETRQITKHVAQILDSRMNTKYDENDKLIREVKVITLKSKLVSDFRKDFQFYKVREINNYHHAHDAYLNAVVGTALIKKYPKLESEFVYGDYKVYDVRKMIAKSEQEIGKATAKYFFYSSGGSKRTADGSEFEPKKKRKV

SEQ ID NO: 3246 - protein, 1803 aa, Artificial Sequence
  Synthetic
MKRTADGSEFESPKKKRKVSEVEFSHEYWMRHALTLAKRAWDEREVPVGAVLVHNNRVIGEGWNRPIGRHDPTAHAEIMALRQGGLVMQNYRLIDATLYVTLEPCVMCAGAMIHSRIGRVVFGARDAKTGAAGSLMDVLHHPGMNHRVEITEGILADECAALLSDFFRMRRQEIKAQKKAQSSTDSGGSSGGSSGSETPGTSESATPESSGGSSGGSSEVEFSHEYWMRHALTLAKRARDEREVPVGAVLVLNNRVIGEGWNRAIGLHDPTAHAEIMALRQGGLVMQNYRLIDATLYVTFEPCVMCAGAMIHSRIGRVVFGVRNSKRGAAGSLMNVLNYPGMNHRVEITEGILADECAALLCDFYRMPRQVFNAQKKAQSSINSGGSSGGSSGSETPGTSESATPESSGGSSGGSDKKYSIGLAIGTNSVGWAVITDEYKVPSKKFKVLGNTDRHSIKKNLIGALLFDSGETAEATRLKRTARRRYTRRKNRICYLQEIFSNEMAKVDDSFFHRLEESFLVEEDKKHERHPIFGNIVDEVAYHEKYPTIYHLRKKLVDSTDKADLRLIYLALAHMIKFRGHFLIEGDLNPDNSDVDKLFIQLVQTYNQLFEENPINASGVDAKAILSARLSKSRRLENLIAQLPGEKKNGLFGNLIALSLGLTPNFKSNFDLAEDAKLQLSKDTYDDDLDNLLAQIGDQYADLFLAAKNLSDAILLSDILRVNTEITKAPLSASMVKRYDEHHQDLTLLKALVRQQLPEKYKEIFFDQSKNGYAGYIDGGASQEEFYKFIKPILEKMDGTEELLVKLNREDLLRKQRTFDNGIIPHQIHLGELHAILRRQGDFYPFLKDNREKIEKILTFRIPYYVGPLARGNSRFAWMTRKSEETITPWNFEEVVDKGASAQSFIERMTNFDKNLPNEKVLPKHSLLYEYFTVYNELTKVKYVTEGMRKPAFLSGEQKKAIVDLLFKTNRKVTVKQLKEDYFKKIECFDSVEISGVEDRFNASLGTYHDLLKIIKDKDFLDNEENEDILEDIVLTLTLFEDREMIEERLKTYAHLFDDKVMKQLKRLRYTGWGRLSRKLINGIRDKQSGKTILDFLKSDGFANRNFMQLIHDDSLTFKEDIQKAQVSCQGDSLHEHIANLAGSPAIKKGILQTVKVVDELIKVMGGHKPENIVIEMARENQTTQKGQKNSRERMKRIEEGIKELGSQILKEHPVENTQLQNEKLYLYYLQNGRDMYVDQELDINRLSDYDVDHIVPQSFLKDDSIENKVLTRSDKNRGKSDNVPSEEVVKKMKNYWRQLLNAKLITQRKFDNLTKAERGGLSELDKAGFIKRQLAETRQITKHVAQILDSRMNTKYDENDKLIREVKVITLKSKLVSDFRKDFQFYKVREINNYHHAHDAYLNAVVGTALIKKYPKLESEFVYGDYKVYDVRKMIAKSEQEIGKATAKYFFYSNIMNFFKTEITLANGEIRKRPLIETNGETGEIVWDKGRDFATVRKVLSMPQVNIVKKTEVQTGGFSKESILPKGNSDKLIARKKDWDPKKYGGFNSPTVAYSVLVVAKVEKGKSKKLKSVKELLGITIMERSSFEKNPIDFLEAKGYKEVKKDLIIKLPKYSLFELENGRKRMLASAGVLQKGNELALPSKYVNFLYLASHYEKLKGSPEDNEQKQLFVEQHKHYLDEIIEQISEFSKRVILADANLDKVLSAYNKHRDKPIREQAENIIHLFTLTNLGAPAAFKYFDTTINRKQYNTTKEVLDATLIRQSITGLYETRIDLSQLGGDSGGSKRTADGSEFEPKKKRKV

SEQ ID NO: 3247 - protein, 1605 aa, Artificial Sequence
  Synthetic
MKRTADGSEFESPKKKRKVSEVEFSHEYWMRHALTLAKRARDEREVPVGAVLVLNNRVIGEGWNRAIGLHDPTAHAEIMALRQGGLVMQNYRLIDATLYVTFEPCVMCAGAMIHSRIGRVVFGVRNSKRGAAGSLMNVLNYPGMNHRVEITEGILADECAALLCDFYRMPRQVFNAQKKAQSSINSGGSSGGSSGSETPGTSESATPESSGGSSGGSDKKYSIGLAIGTNSVGWAVITDEYKVPSKKFKVLGNTDRHSIKKNLIGALLFDSGETAEATRLKRTARRRYTRRKNRICYLQEIFSNEMAKVDDSFFHRLEESFLVEEDKKHERHPIFGNIVDEVAYHEKYPTIYHLRKKLVDSTDKADLRLIYLALAHMIKFRGHFLIEGDLNPDNSDVDKLFIQLVQTYNQLFEENPINASGVDAKAILSARLSKSRRLENLIAQLPGEKKNGLFGNLIALSLGLTPNFKSNFDLAEDAKLQLSKDTYDDDLDNLLAQIGDQYADLFLAAKNLSDAILLSDILRVNTEITKAPLSASMVKRYDEHHQDLTLLKALVRQQLPEKYKEIFFDQSKNGYAGYIDGGASQEEFYKFIKPILEKMDGTEELLVKLNREDLLRKQRTFDNGIIPHQIHLGELHAILRRQGDFYPFLKDNREKIEKILTFRIPYYVGPLARGNSRFAWMTRKSEETITPWNFEEVVDKGASAQSFIERMTNFDKNLPNEKVLPKHSLLYEYFTVYNELTKVKYVTEGMRKPAFLSGEQKKAIVDLLFKTNRKVTVKQLKEDYFKKIECFDSVEISGVEDRFNASLGTYHDLLKIIKDKDFLDNEENEDILEDIVLTLTLFEDREMIEERLKTYAHLFDDKVMKQLKRLRYTGWGRLSRKLINGIRDKQSGKTILDFLKSDGFANRNFMQLIHDDSLTFKEDIQKAQVSCQGDSLHEHIANLAGSPAIKKGILQTVKVVDELIKVMGGHKPENIVIEMARENQTTQKGQKNSRERMKRIEEGIKELGSQILKEHPVENTQLQNEKLYLYYLQNGRDMYVDQELDINRLSDYDVDHIVPQSFLKDDSIENKVLTRSDKNRGKSDNVPSEEVVKKMKNYWRQLLNAKLITQRKFDNLTKAERGGLSELDKAGFIKRQLAETRQITKHVAQILDSRMNTKYDENDKLIREVKVITLKSKLVSDFRKDFQFYKVREINNYHHAHDAYLNAVVGTALIKKYPKLESEFVYGDYKVYDVRKMIAKSEQEIGKATAKYFFYSNIMNFFKTEITLANGEIRKRPLIETNGETGEIVWDKGRDFATVRKVLSMPQVNIVKKTEVQTGGFSKESILPKGNSDKLIARKKDWDPKKYGGFNSPTVAYSVLVVAKVEKGKSKKLKSVKELLGITIMERSSFEKNPIDFLEAKGYKEVKKDLIIKLPKYSLFELENGRKRMLASAGVLQKGNELALPSKYVNFLYLASHYEKLKGSPEDNEQKQLFVEQHKHYLDEIIEQISEFSKRVILADANLDKVLSAYNKHRDKPIREQAENIIHLFTLTNLGAPAAFKYFDTTINRKQYNTTKEVLDATLIRQSITGLYETRIDLSQLGGDSGGSKRTADGSEFEPKKKRKV

SEQ ID NO: 3248 - protein, 1803 aa, Artificial Sequence
  Synthetic
MKRTADGSEFESPKKKRKVSEVEFSHEYWMRHALTLAKRAWDEREVPVGAVLVHNNRVIGEGWNRPIGRHDPTAHAEIMALRQGGLVMQNYRLIDATLYVTLEPCVMCAGAMIHSRIGRVVFGARDAKTGAAGSLMDVLHHPGMNHRVEITEGILADECAALLSDFFRMRRQEIKAQKKAQSSTDSGGSSGGSSGSETPGTSESATPESSGGSSGGSSEVEFSHEYWMRHALTLAKRARDEREVPVGAVLVLNNRVIGEGWNRAIGLHDPTAHAEIMALRQGGLVMQNYRLIDATLYVTFEPCVMCAGAMIHSRIGRVVFGVRNSKRGAAGSLMNVLNYPGMNHRVEITEGILADECAALLCDFYRMPRQVFNAQKKAQSSINSGGSSGGSSGSETPGTSESATPESSGGSSGGSDKKYSIGLAIGTNSVGWAVITDEYKVPSKKFKVLGNTDRHSIKKNLIGALLFDSGETAEATRLKRTARRRYTRRKNRICYLQEIFSNEMAKVDDSFFHRLEESFLVEEDKKHERHPIFGNIVDEVAYHEKYPTIYHLRKKLVDSTDKADLRLIYLALAHMIKFRGHFLIEGDLNPDNSDVDKLFIQLVQTYNQLFEENPINASGVDAKAILSARLSKSRRLENLIAQLPGEKKNGLFGNLIALSLGLTPNFKSNFDLAEDAKLQLSKDTYDDDLDNLLAQIGDQYADLFLAAKNLSDAILLSDILRVNTEITKAPLSASMVKRYDEHHQDLTLLKALVRQQLPEKYKEIFFDQSKNGYAGYIDGGASQEEFYKFIKPILEKMDGTEELLVKLNREDLLRKQRTFDNGIIPHQIHLGELHAILRRQGDFYPFLKDNREKIEKILTFRIPYYVGPLARGNSRFAWMTRKSEETITPWNFEEVVDKGASAQSFIERMTNFDKNLPNEKVLPKHSLLYEYFTVYNELTKVKYVTEGMRKPAFLSGEQKKAIVDLLFKTNRKVTVKQLKEDYFKKIECFDSVEISGVEDRFNASLGTYHDLLKIIKDKDFLDNEENEDILEDIVLTLTLFEDREMIEERLKTYAHLFDDKVMKQLKRLRYTGWGRLSRKLINGIRDKQSGKTILDFLKSDGFANRNFMQLIHDDSLTFKEDIQKAQVSCQGDSLHEHIANLAGSPAIKKGILQTVKVVDELIKVMGGHKPENIVIEMARENQTTQKGQKNSRERMKRIEEGIKELGSQILKEHPVENTQLQNEKLYLYYLQNGRDMYVDQELDINRLSDYDVDHIVPQSFLKDDSIENKVLTRSDKNRGKSDNVPSEEVVKKMKNYWRQLLNAKLITQRKFDNLTKAERGGLSELDKAGFIKRQLAETRQITKHVAQILDSRMNTKYDENDKLIREVKVITLKSKLVSDFRKDFQFYKVREINNYHHAHDAYLNAVVGTALIKKYPKLESEFVYGDYKVYDVRKMIAKSEQEIGKATAKYFFYSNIMNFFKTEITLANGEIRKRPLIETNGETGEIVWDKGRDFATVRKVLSMPQVNIVKKTEVQTGGFSKESILPKGNSDKLIARKKDWDPKKYGGFNSPTAAYSVLVVAKVEKGKSKKLKSVKELLGITIMERSSFEKNPIGFLEAKGYKEVKKDLIIKLPKYSLFELENGRKRMLASAGVLHKGNELALPSKYVNFLYLASHYEKLKGSPEDNEQKQLFVEQHKHYLDEIIEQISEFSKRVILADANLDKVLSAYNKHRDKPIREQAENIIHLFTLTNLGVPAAFKYFDTTIDKKRYTSTKEVLDATLIHQSITGLYETRIDLSQLGGDSGGSKRTADGSEFEPKKKRKV

SEQ ID NO: 3249 - protein, 1605 aa, Artificial Sequence
  Synthetic
MKRTADGSEFESPKKKRKVSEVEFSHEYWMRHALTLAKRARDEREVPVGAVLVLNNRVIGEGWNRAIGLHDPTAHAEIMALRQGGLVMQNYRLIDATLYVTFEPCVMCAGAMIHSRIGRVVFGVRNSKRGAAGSLMNVLNYPGMNHRVEITEGILADECAALLCDFYRMPRQVFNAQKKAQSSINSGGSSGGSSGSETPGTSESATPESSGGSSGGSDKKYSIGLAIGTNSVGWAVITDEYKVPSKKFKVLGNTDRHSIKKNLIGALLFDSGETAEATRLKRTARRRYTRRKNRICYLQEIFSNEMAKVDDSFFHRLEESFLVEEDKKHERHPIFGNIVDEVAYHEKYPTIYHLRKKLVDSTDKADLRLIYLALAHMIKFRGHFLIEGDLNPDNSDVDKLFIQLVQTYNQLFEENPINASGVDAKAILSARLSKSRRLENLIAQLPGEKKNGLFGNLIALSLGLTPNFKSNFDLAEDAKLQLSKDTYDDDLDNLLAQIGDQYADLFLAAKNLSDAILLSDILRVNTEITKAPLSASMVKRYDEHHQDLTLLKALVRQQLPEKYKEIFFDQSKNGYAGYIDGGASQEEFYKFIKPILEKMDGTEELLVKLNREDLLRKQRTFDNGIIPHQIHLGELHAILRRQGDFYPFLKDNREKIEKILTFRIPYYVGPLARGNSRFAWMTRKSEETITPWNFEEVVDKGASAQSFIERMTNFDKNLPNEKVLPKHSLLYEYFTVYNELTKVKYVTEGMRKPAFLSGEQKKAIVDLLFKTNRKVTVKQLKEDYFKKIECFDSVEISGVEDRFNASLGTYHDLLKIIKDKDFLDNEENEDILEDIVLTLTLFEDREMIEERLKTYAHLFDDKVMKQLKRLRYTGWGRLSRKLINGIRDKQSGKTILDFLKSDGFANRNFMQLIHDDSLTFKEDIQKAQVSCQGDSLHEHIANLAGSPAIKKGILQTVKVVDELIKVMGGHKPENIVIEMARENQTTQKGQKNSRERMKRIEEGIKELGSQILKEHPVENTQLQNEKLYLYYLQNGRDMYVDQELDINRLSDYDVDHIVPQSFLKDDSIENKVLTRSDKNRGKSDNVPSEEVVKKMKNYWRQLLNAKLITQRKFDNLTKAERGGLSELDKAGFIKRQLAETRQITKHVAQILDSRMNTKYDENDKLIREVKVITLKSKLVSDFRKDFQFYKVREINNYHHAHDAYLNAVVGTALIKKYPKLESEFVYGDYKVYDVRKMIAKSEQEIGKATAKYFFYSNIMNFFKTEITLANGEIRKRPLIETNGETGEIVWDKGRDFATVRKVLSMPQVNIVKKTEVQTGGFSKESILPKGNSDKLIARKKDWDPKKYGGFNSPTAAYSVLVVAKVEKGKSKKLKSVKELLGITIMERSSFEKNPIGFLEAKGYKEVKKDLIIKLPKYSLFELENGRKRMLASAGVLHKGNELALPSKYVNFLYLASHYEKLKGSPEDNEQKQLFVEQHKHYLDEIIEQISEFSKRVILADANLDKVLSAYNKHRDKPIREQAENIIHLFTLTNLGVPAAFKYFDTTIDKKRYTSTKEVLDATLIHQSITGLYETRIDLSQLGGDSGGSKRTADGSEFEPKKKRKV

SEQ ID NO: 3250 - protein, 1489 aa, Artificial Sequence
  Synthetic
MKRTADGSEFESPKKKRKVSEVEFSHEYWMRHALTLAKRAWDEREVPVGAVLVHNNRVIGEGWNRPIGRHDPTAHAEIMALRQGGLVMQNYRLIDATLYVTLEPCVMCAGAMIHSRIGRVVFGARDAKTGAAGSLMDVLHHPGMNHRVEITEGILADECAALLSDFFRMRRQEIKAQKKAQSSTDSGGSSGGSSGSETPGTSESATPESSGGSSGGSSEVEFSHEYWMRHALTLAKRARDEREVPVGAVLVLNNRVIGEGWNRAIGLHDPTAHAEIMALRQGGLVMQNYRLIDATLYVTFEPCVMCAGAMIHSRIGRVVFGVRNSKRGAAGSLMNVLNYPGMNHRVEITEGILADECAALLCDFYRMPRQVFNAQKKAQSSINSGGSSGGSSGSETPGTSESATPESSGGSSGGSGKRNYILGLAIGITSVGYGIIDYETRDVIDAGVRLFKEANVENNEGRRSKRGARRLKRRRRHRIQRVKKLLFDYNLLTDHSELSGINPYEARVKGLSQKLSEEEFSAALLHLAKRRGVHNVNEVEEDTGNELSTKEQISRNSKALEEKYVAELQLERLKKDGEVRGSINRFKTSDYVKEAKQLLKVQKAYHQLDQSFIDTYIDLLETRRTYYEGPGEGSPFGWKDIKEWYEMLMGHCTYFPEELRSVKYAYNADLYNALNDLNNLVITRDENEKLEYYEKFQIIENVFKQKKKPTLKQIAKEILVNEEDIKGYRVTSTGKPEFTNLKVYHDIKDITARKEIIENAELLDQIAKILTIYQSSEDIQEELTNLNSELTQEEIEQISNLKGYTGTHNLSLKAINLILDELWHTNDNQIAIFNRLKLVPKKVDLSQQKEIPTTLVDDFILSPVVKRSFIQSIKVINAIIKKYGLPNDIIIELAREKNSKDAQKMINEMQKRNRQTNERIEEIIRTTGKENAKYLIEKIKLHDMQEGKCLYSLEAIPLEDLLNNPFNYEVDHIIPRSVSFDNSFNNKVLVKQEENSKKGNRTPFQYLSSSDSKISYETFKKHILNLAKGKGRISKTKKEYLLEERDINRFSVQKDFINRNLVDTRYATRGLMNLLRSYFRVNNLDVKVKSINGGFTSFLRRKWKFKKERNKGYKHHAEDALIIANADFIFKEWKKLDKAKKVMENQMFEEKQAESMPEIETEQEYKEIFITPHQIKHIKDFKDYKYSHRVDKKPNRKLINDTLYSTRKDDKGNTLIVNNLNGLYDKDNDKLKKLINKSPEKLLMYHHDPQTYQKLKLIMEQYGDEKNPLYKYYEETGNYLTKYSKKDNGPVIKKIKYYGNKLNAHLDITDDYPNSRNKVVKLSLKPYRFDVYLDNGVYKFVTVKNLDVIKKENYYEVNSKCYEEAKKLKKISNQAEFIASFYKNDLIKINGELYRVIGVNNDLLNRIEVNMIDITYREYLENMNDKRPPHIIKTIASKTQSIKKYSTDILGNLYEVKSKKHPQIIKKGSGGSKRTADGSEFEPKKKRKV

SEQ ID NO: 3251 - protein, 1291 aa, Artificial Sequence
  Synthetic
MKRTADGSEFESPKKKRKVSEVEFSHEYWMRHALTLAKRARDEREVPVGAVLVLNNRVIGEGWNRAIGLHDPTAHAEIMALRQGGLVMQNYRLIDATLYVTFEPCVMCAGAMIHSRIGRVVFGVRNSKRGAAGSLMNVLNYPGMNHRVEITEGILADECAALLCDFYRMPRQVFNAQKKAQSSINSGGSSGGSSGSETPGTSESATPESSGGSSGGSGKRNYILGLAIGITSVGYGIIDYETRDVIDAGVRLFKEANVENNEGRRSKRGARRLKRRRRHRIQRVKKLLFDYNLLTDHSELSGINPYEARVKGLSQKLSEEEFSAALLHLAKRRGVHNVNEVEEDTGNELSTKEQISRNSKALEEKYVAELQLERLKKDGEVRGSINRFKTSDYVKEAKQLLKVQKAYHQLDQSFIDTYIDLLETRRTYYEGPGEGSPFGWKDIKEWYEMLMGHCTYFPEELRSVKYAYNADLYNALNDLNNLVITRDENEKLEYYEKFQIIENVFKQKKKPTLKQIAKEILVNEEDIKGYRVTSTGKPEFTNLKVYHDIKDITARKEIIENAELLDQIAKILTIYQSSEDIQEELTNLNSELTQEEIEQISNLKGYTGTHNLSLKAINLILDELWHTNDNQIAIFNRLKLVPKKVDLSQQKEIPTTLVDDFILSPVVKRSFIQSIKVINAIIKKYGLPNDIIIELAREKNSKDAQKMINEMQKRNRQTNERIEEIIRTTGKENAKYLIEKIKLHDMQEGKCLYSLEAIPLEDLLNNPFNYEVDHIIPRSVSFDNSFNNKVLVKQEENSKKGNRTPFQYLSSSDSKISYETFKKHILNLAKGKGRISKTKKEYLLEERDINRFSVQKDFINRNLVDTRYATRGLMNLLRSYFRVNNLDVKVKSINGGFTSFLRRKWKFKKERNKGYKHHAEDALIIANADFIFKEWKKLDKAKKVMENQMFEEKQAESMPEIETEQEYKEIFITPHQIKHIKDFKDYKYSHRVDKKPNRKLINDTLYSTRKDDKGNTLIVNNLNGLYDKDNDKLKKLINKSPEKLLMYHHDPQTYQKLKLIMEQYGDEKNPLYKYYEETGNYLTKYSKKDNGPVIKKIKYYGNKLNAHLDITDDYPNSRNKVVKLSLKPYRFDVYLDNGVYKFVTVKNLDVIKKENYYEVNSKCYEEAKKLKKISNQAEFIASFYKNDLIKINGELYRVIGVNNDLLNRIEVNMIDITYREYLENMNDKRPPHIIKTIASKTQSIKKYSTDILGNLYEVKSKKHPQIIKKGSGGSKRTADGSEFEPKKKRKV

SEQ ID NO: 3252 - protein, 1823 aa, Artificial Sequence
  Synthetic
MKRTADGSEFESPKKKRKVSEVEFSHEYWMRHALTLAKRAWDEREVPVGAVLVHNNRVIGEGWNRPIGRHDPTAHAEIMALRQGGLVMQNYRLIDATLYVTLEPCVMCAGAMIHSRIGRVVFGARDAKTGAAGSLMDVLHHPGMNHRVEITEGILADECAALLSDFFRMRRQEIKAQKKAQSSTDSGGSSGGSSGSETPGTSESATPESSGGSSGGSSEVEFSHEYWMRHALTLAKRARDEREVPVGAVLVLNNRVIGEGWNRAIGLHDPTAHAEIMALRQGGLVMQNYRLIDATLYVTFEPCVMCAGAMIHSRIGRVVFGVRNSKRGAAGSLMNVLNYPGMNHRVEITEGILADECAALLCDFYRMPRQVFNAQKKAQSSINSGGSSGGSSGSETPGTSESATPESSGGSSGGSNIMNFFKTEITLANGEIRKRPLIETNGETGEIVWDKGRDFATVRKVLSMPQVNIVKKTEVQTGGFSKESILPKRNSDKLIARKKDWDPKKYGGFDSPTVAYSVLVVAKVEKGKSKKLKSVKELLGITIMERSSFEKNPIDFLEAKGYKEVKKDLIIKLPKYSLFELENGRKRMLASAGELQKGNELALPSKYVNFLYLASHYEKLKGSPEDNEQKQLFVEQHKHYLDEIIEQISEFSKRVILADANLDKVLSAYNKHRDKPIREQAENIIHLFTLTNLGAPAAFKYFDTTIDRKRYTSTKEVLDATLIHQSITGLYETRIDLSQLGGDGGSGGSGGSGGSGGSGGSGGDKKYSIGLAIGTNSVGWAVITDEYKVPSKKFKVLGNTDRHSIKKNLIGALLFDSGETAEATRLKRTARRRYTRRKNRICYLQEIFSNEMAKVDDSFFHRLEESFLVEEDKKHERHPIFGNIVDEVAYHEKYPTIYHLRKKLVDSTDKADLRLIYLALAHMIKFRGHFLIEGDLNPDNSDVDKLFIQLVQTYNQLFEENPINASGVDAKAILSARLSKSRRLENLIAQLPGEKKNGLFGNLIALSLGLTPNFKSNFDLAEDAKLQLSKDTYDDDLDNLLAQIGDQYADLFLAAKNLSDAILLSDILRVNTEITKAPLSASMIKRYDEHHQDLTLLKALVRQQLPEKYKEIFFDQSKNGYAGYIDGGASQEEFYKFIKPILEKMDGTEELLVKLNREDLLRKQRTFDNGSIPHQIHLGELHAILRRQEDFYPFLKDNREKIEKILTFRIPYYVGPLARGNSRFAWMTRKSEETITPWNFEEVVDKGASAQSFIERMTNFDKNLPNEKVLPKHSLLYEYFTVYNELTKVKYVTEGMRKPAFLSGEQKKAIVDLLFKTNRKVTVKQLKEDYFKKIECFDSVEISGVEDRFNASLGTYHDLLKIIKDKDFLDNEENEDILEDIVLTLTLFEDREMIEERLKTYAHLFDDKVMKQLKRRRYTGWGRLSRKLINGIRDKQSGKTILDFLKSDGFANRNFMQLIHDDSLTFKEDIQKAQVSGQGDSLHEHIANLAGSPAIKKGILQTVKVVDELVKVMGRHKPENIVIEMARENQTTQKGQKNSRERMKRIEEGIKELGSQILKEHPVENTQLQNEKLYLYYLQNGRDMYVDQELDINRLSDYDVDHIVPQSFLKDDSIDNKVLTRSDKNRGKSDNVPSEEVVKKMKNYWRQLLNAKLITQRKFDNLTKAERGGLSELDKAGFIKRQLVETRQITKHVAQILDSRMNTKYDENDKLIREVKVITLKSKLVSDFRKDFQFYKVREINNYHHAHDAYLNAVVGTALIKKYPKLESEFVYGDYKVYDVRKMIAKSEQEIGKATAKYFFYSSGGSKRTADGSEFEPKKKRKV

SEQ ID NO: 3253 - protein, 1803 aa, Artificial Sequence
  Synthetic
MKRTADGSEFESPKKKRKVSEVEFSHEYWMRHALTLAKRAWDEREVPVGAVLVHNNRVIGEGWNRPIGRHDPTAHAEIMALRQGGLVMQNYRLIDATLYVTLEPCVMCAGAMIHSRIGRVVFGARDAKTGAAGSLMDVLHHPGMNHRVEITEGILADECAALLSDFFRMRRQEIKAQKKAQSSTDSGGSSGGSSGSETPGTSESATPESSGGSSGGSSEVEFSHEYWMRHALTLAKRARDEREVPVGAVLVLNNRVIGEGWNRAIGLHDPTAHAEIMALRQGGLVMQNYRLIDATLYVTFEPCVMCAGAMIHSRIGRVVFGVRNSKRGAAGSLMNVLNYPGMNHRVEITEGILADECAALLCDFYRMPRQVFNAQKKAQSSINSGGSSGGSSGSETPGTSESATPESSGGSSGGSDKKYSIGLAIGTNSVGWAVITDEYKVPSKKFKVLGNTDRHSIKKNLIGALLFDSGETAEATRLKRTARRRYTRRKNRICYLQEIFSNEMAKVDDSFFHRLEESFLVEEDKKHERHPIFGNIVDEVAYHEKYPTIYHLRKKLVDSTDKADLRLIYLALAHMIKFRGHFLIEGDLNPDNSDVDKLFIQLVQTYNQLFEENPINASGVDAKAILSARLSKSRRLENLIAQLPGEKKNGLFGNLIALSLGLTPNFKSNFDLAEDAKLQLSKDTYDDDLDNLLAQIGDQYADLFLAAKNLSDAILLSDILRVNTEITKAPLSASMIKRYDEHHQDLTLLKALVRQQLPEKYKEIFFDQSKNGYAGYIDGGASQEEFYKFIKPILEKMDGTEELLVKLNREDLLRKQRTFDNGSIPHQIHLGELHAILRRQEDFYPFLKDNREKIEKILTFRIPYYVGPLARGNSRFAWMTRKSEETITPWNFEEVVDKGASAQSFIERMTNFDKNLPNEKVLPKHSLLYEYFTVYNELTKVKYVTEGMRKPAFLSGEQKKAIVDLLFKTNRKVTVKQLKEDYFKKIECFDSVEISGVEDRFNASLGTYHDLLKIIKDKDFLDNEENEDILEDIVLTLTLFEDREMIEERLKTYAHLFDDKVMKQLKRRRYTGWGRLSRKLINGIRDKQSGKTILDFLKSDGFANRNFMQLIHDDSLTFKEDIQKAQVSGQGDSLHEHIANLAGSPAIKKGILQTVKVVDELVKVMGRHKPENIVIEMARENQTTQKGQKNSRERMKRIEEGIKELGSQILKEHPVENTQLQNEKLYLYYLQNGRDMYVDQELDINRLSDYDVDHIVPQSFLKDDSIDNKVLTRSDKNRGKSDNVPSEEVVKKMKNYWRQLLNAKLITQRKFDNLTKAERGGLSELDKAGFIKRQLVETRQITKHVAQILDSRMNTKYDENDKLIREVKVITLKSKLVSDFRKDFQFYKVREINNYHHAHDAYLNAVVGTALIKKYPKLESEFVYGDYKVYDVRKMIAKSEQEIGKATAKYFFYSNIMNFFKTEITLANGEIRKRPLIETNGETGEIVWDKGRDFATVRKVLSMPQVNIVKKTEVQTGGFSKESILPKRNSDKLIARKKDWDPKKYGGFVSPTVAYSVLVVAKVEKGKSKKLKSVKELLGITIMERSSFEKNPIDFLEAKGYKEVKKDLIIKLPKYSLFELENGRKRMLASARELQKGNELALPSKYVNFLYLASHYEKLKGSPEDNEQKQLFVEQHKHYLDEIIEQISEFSKRVILADANLDKVLSAYNKHRDKPIREQAENIIHLFTLTNLGAPAAFKYFDTTIDRKQYRSTKEVLDATLIHQSITGLYETRIDLSQLGGDSGGSKRTADGSEFEPKKKRKV

SEQ ID NO: 3254 - protein, 1605 aa, Artificial Sequence
  Synthetic
MKRTADGSEFESPKKKRKVSEVEFSHEYWMRHALTLAKRARDEREVPVGAVLVLNNRVIGEGWNRAIGLHDPTAHAEIMALRQGGLVMQNYRLIDATLYVTFEPCVMCAGAMIHSRIGRVVFGVRNSKRGAAGSLMNVLNYPGMNHRVEITEGILADECAALLCDFYRMPRQVFNAQKKAQSSINSGGSSGGSSGSETPGTSESATPESSGGSSGGSDKKYSIGLAIGTNSVGWAVITDEYKVPSKKFKVLGNTDRHSIKKNLIGALLFDSGETAEATRLKRTARRRYTRRKNRICYLQEIFSNEMAKVDDSFFHRLEESFLVEEDKKHERHPIFGNIVDEVAYHEKYPTIYHLRKKLVDSTDKADLRLIYLALAHMIKFRGHFLIEGDLNPDNSDVDKLFIQLVQTYNQLFEENPINASGVDAKAILSARLSKSRRLENLIAQLPGEKKNGLFGNLIALSLGLTPNFKSNFDLAEDAKLQLSKDTYDDDLDNLLAQIGDQYADLFLAAKNLSDAILLSDILRVNTEITKAPLSASMIKRYDEHHQDLTLLKALVRQQLPEKYKEIFFDQSKNGYAGYIDGGASQEEFYKFIKPILEKMDGTEELLVKLNREDLLRKQRTFDNGSIPHQIHLGELHAILRRQEDFYPFLKDNREKIEKILTFRIPYYVGPLARGNSRFAWMTRKSEETITPWNFEEVVDKGASAQSFIERMTNFDKNLPNEKVLPKHSLLYEYFTVYNELTKVKYVTEGMRKPAFLSGEQKKAIVDLLFKTNRKVTVKQLKEDYFKKIECFDSVEISGVEDRFNASLGTYHDLLKIIKDKDFLDNEENEDILEDIVLTLTLFEDREMIEERLKTYAHLFDDKVMKQLKRRRYTGWGRLSRKLINGIRDKQSGKTILDFLKSDGFANRNFMQLIHDDSLTFKEDIQKAQVSGQGDSLHEHIANLAGSPAIKKGILQTVKVVDELVKVMGRHKPENIVIEMARENQTTQKGQKNSRERMKRIEEGIKELGSQILKEHPVENTQLQNEKLYLYYLQNGRDMYVDQELDINRLSDYDVDHIVPQSFLKDDSIDNKVLTRSDKNRGKSDNVPSEEVVKKMKNYWRQLLNAKLITQRKFDNLTKAERGGLSELDKAGFIKRQLVETRQITKHVAQILDSRMNTKYDENDKLIREVKVITLKSKLVSDFRKDFQFYKVREINNYHHAHDAYLNAVVGTALIKKYPKLESEFVYGDYKVYDVRKMIAKSEQEIGKATAKYFFYSNIMNFFKTEITLANGEIRKRPLIETNGETGEIVWDKGRDFATVRKVLSMPQVNIVKKTEVQTGGFSKESILPKRNSDKLIARKKDWDPKKYGGFVSPTVAYSVLVVAKVEKGKSKKLKSVKELLGITIMERSSFEKNPIDFLEAKGYKEVKKDLIIKLPKYSLFELENGRKRMLASARELQKGNELALPSKYVNFLYLASHYEKLKGSPEDNEQKQLFVEQHKHYLDEIIEQISEFSKRVILADANLDKVLSAYNKHRDKPIREQAENIIHLFTLTNLGAPAAFKYFDTTIDRKQYRSTKEVLDATLIHQSITGLYETRIDLSQLGGDSGGSKRTADGSEFEPKKKRKV

SEQ ID NO: 3255 - protein, 1534 aa, Artificial Sequence
  Synthetic
MKRTADGSEFESPKKKRKVSEVEFSHEYWMRHALTLAKRAWDEREVPVGAVLVHNNRVIGEGWNRPIGRHDPTAHAEIMALRQGGLVMQNYRLIDATLYVTLEPCVMCAGAMIHSRIGRVVFGARDAKTGAAGSLMDVLHHPGMNHRVEITEGILADECAALLSDFFRMRRQEIKAQKKAQSSTDSGGSSGGSSGSETPGTSESATPESSGGSSGGSSEVEFSHEYWMRHALTLAKRARDEREVPVGAVLVLNNRVIGEGWNRAIGLHDPTAHAEIMALRQGGLVMQNYRLIDATLYVTFEPCVMCAGAMIHSRIGRVVFGVRNSKRGAAGSLMNVLNYPGMNHRVEITEGILADECAALLCDFYRMPRQVFNAQKKAQSSINSGGSSGGSSGSETPGTSESATPESSGGSSGGSDKKYSIGLDIGTNSVGWAVITDEYKVPSKKFKVLGNTDRHSIKKNLIGALLFDSGETAEATRLKRTARRRYTRRKNRICYLQEIFSNEMAKVDDSFFHRLEESFLVEEDKKHERHPIFGNIVDEVAYHEKYPTIYHLRKKLVDSTDKADLRLIYLALAHMIKFRGHFLIEGDLNPDNSDVDKLFIQLVQTYNQLFEENPINASGVDAKAILSARLSKSRRLENLIAQLPGEKKNGLFGNLIALSLGLTPNFKSNFDLAEDAKLQLSKDTYDDDLDNLLAQIGDQYADLFLAAKNLSDAILLSDILRVNTEITKAPLSASMIKRYDEHHQDLTLLKALVRQQLPEKYKEIFFDQSKNGYAGYIDGGASQEEFYKFIKPILEKMDGTEELLVKLNREDLLRKQRTFDNGSIPHQIHLGELHAILRRQEDFYPFLKDNREKIEKILTFRIPYYVGPLARGNSRFAWMTRKSEETITPWNFEEVVDKGASAQSFIERMTNFDKNLPNEKVLPKHSLLYEYFTVYNELTKVKYVTEGMRKPAFLSGEQKKAIVDLLFKTNRKVTVKQLKEDYFKKIECFDSVEISGVEDRFNASLGTYHDLLKIIKDKDFLDNEENEDILEDIVLTLTLFEDREMIEERLKTYAHLFDDKVMKQLKRRRYTGWGRLSRKLINGIRDKQSGKTILDFLKSDGFANRNFMQLIHDDSLTFKEDIQKAQVSGQGDSLHEHIANLAGSPAIKKGILQTVKVVDELVKVMGRHKPENIVIEMARENQTTQKGQKNSRERMKRIEEGIKELGSQILKEHPVENTQLQNEKLYLYYLQNGRDMYVDQELDINRLSDYDVDHIVPQSFLKDDSIDNKVLTRSDKNRGKSDNVPSEEVVKKMKNYWRQLLNAKLITQRKFDNLTKAERGGLSELDKAGFIKRQLVETRQITKHVAQILDSRMNTKYDENDKLIREVKVITLKSKLVSDFRKDFQFYKVREINNYHHAHDAYLNAVVGTALIKKYPKLESEFVYGDYKVYDVRKMIAKSEQEIGKATAKYFFYSNIMNFFKTEITLANGEIRKRPLIETNGETGEIVWDKGRDFATVRKVLSMPQVNIVKKTESGGSKRTADGSEFEPKKKRKV

SEQ ID NO: 3256 - protein, 1336 aa, Artificial Sequence
  Synthetic
MKRTADGSEFESPKKKRKVSEVEFSHEYWMRHALTLAKRARDEREVPVGAVLVLNNRVIGEGWNRAIGLHDPTAHAEIMALRQGGLVMQNYRLIDATLYVTFEPCVMCAGAMIHSRIGRVVFGVRNSKRGAAGSLMNVLNYPGMNHRVEITEGILADECAALLCDFYRMPRQVFNAQKKAQSSINSGGSSGGSSGSETPGTSESATPESSGGSSGGSDKKYSIGLDIGTNSVGWAVITDEYKVPSKKFKVLGNTDRHSIKKNLIGALLFDSGETAEATRLKRTARRRYTRRKNRICYLQEIFSNEMAKVDDSFFHRLEESFLVEEDKKHERHPIFGNIVDEVAYHEKYPTIYHLRKKLVDSTDKADLRLIYLALAHMIKFRGHFLIEGDLNPDNSDVDKLFIQLVQTYNQLFEENPINASGVDAKAILSARLSKSRRLENLIAQLPGEKKNGLFGNLIALSLGLTPNFKSNFDLAEDAKLQLSKDTYDDDLDNLLAQIGDQYADLFLAAKNLSDAILLSDILRVNTEITKAPLSASMIKRYDEHHQDLTLLKALVRQQLPEKYKEIFFDQSKNGYAGYIDGGASQEEFYKFIKPILEKMDGTEELLVKLNREDLLRKQRTFDNGSIPHQIHLGELHAILRRQEDFYPFLKDNREKIEKILTFRIPYYVGPLARGNSRFAWMTRKSEETITPWNFEEVVDKGASAQSFIERMTNFDKNLPNEKVLPKHSLLYEYFTVYNELTKVKYVTEGMRKPAFLSGEQKKAIVDLLFKTNRKVTVKQLKEDYFKKIECFDSVEISGVEDRFNASLGTYHDLLKIIKDKDFLDNEENEDILEDIVLTLTLFEDREMIEERLKTYAHLFDDKVMKQLKRRRYTGWGRLSRKLINGIRDKQSGKTILDFLKSDGFANRNFMQLIHDDSLTFKEDIQKAQVSGQGDSLHEHIANLAGSPAIKKGILQTVKVVDELVKVMGRHKPENIVIEMARENQTTQKGQKNSRERMKRIEEGIKELGSQILKEHPVENTQLQNEKLYLYYLQNGRDMYVDQELDINRLSDYDVDHIVPQSFLKDDSIDNKVLTRSDKNRGKSDNVPSEEVVKKMKNYWRQLLNAKLITQRKFDNLTKAERGGLSELDKAGFIKRQLVETRQITKHVAQILDSRMNTKYDENDKLIREVKVITLKSKLVSDFRKDFQFYKVREINNYHHAHDAYLNAVVGTALIKKYPKLESEFVYGDYKVYDVRKMIAKSEQEIGKATAKYFFYSNIMNFFKTEITLANGEIRKRPLIETNGETGEIVWDKGRDFATVRKVLSMPQVNIVKKTESGGSKRTADGSEFEPKKKRKV

SEQ ID NO: 3257 - DNA, 84 bp, Artificial Sequence
  Synthetic
  misc_feature (51)..(65): n is a, c, g, or t
tttttgttttgtctgtgttccgttgtccgtgctgtaacgaaaggtgcagtnnnnnnnnnnnnnnngatgggtgcgacgcgtcat

SEQ ID NO: 3258 - DNA, 60 bp, Artificial Sequence
  Synthetic
gttgataacggactagccttatttaaacttgctatgctgtttccagcatagctcttaaac

SEQ ID NO: 3259 - DNA, 25 bp, Artificial Sequence
  Synthetic
gtttaagagctatgctggaaacagc

SEQ ID NO: 3260 - DNA, 61 bp, Artificial Sequence
  Synthetic
actgcacctttcgttacagcacggacaacggaacacagacaaaacaaaaaagcaccgactc

SEQ ID NO: 3261 - DNA, 60 bp, Artificial Sequence
  Synthetic
taacttgaaagtatttcgatttcttggctttatatatcttgtggaaaggacgaaacaccg

SEQ ID NO: 3262 - DNA, 90 bp, Artificial Sequence
  Synthetic
ttgtggtttgtccaaactcatcaatgtatcttatcatgtctgctcgaagcggccgtacctctagacactctttccctacacgacgctctt

SEQ ID NO: 3263 - DNA, 49 bp, Artificial Sequence
  Synthetic
aatgatacggcgaccaccgagatctacacacactctttccctacacgac

SEQ ID NO: 3264 - DNA, 54 bp, Artificial Sequence
  Synthetic
gtgactggagttcagacgtgtgctcttccgatctgtggaaaggacgaaacaccg

SEQ ID NO: 3265 - DNA, 29 bp, Artificial Sequence
  Synthetic
aatgatacggcgaccaccgagatctacac

SEQ ID NO: 3266 - DNA, 52 bp, Artificial Sequence
  Synthetic
caagcagaagacggcatacgagatgtgactggagttcagacgtgtgctcttc

SEQ ID NO: 3267 - DNA, 20 bp, Artificial Sequence
  Synthetic
gaacacaaagcatagactgc

SEQ ID NO: 3268 - DNA, 20 bp, Artificial Sequence
  Synthetic
ggcactgcggctggaggtgg

SEQ ID NO: 3269 - DNA, 20 bp, Artificial Sequence
  Synthetic
ggcgtactccatgacaaagc

SEQ ID NO: 3270 - DNA, 20 bp, Artificial Sequence
  Synthetic
gagtccgagcagaagaagaa

SEQ ID NO: 3271 - DNA, 20 bp, Artificial Sequence
  Synthetic
ccagccccatctgtcaaact

SEQ ID NO: 3272 - DNA, 25 bp, Artificial Sequence
  Synthetic
tgaatggattccttggaaacaatga

SEQ ID NO: 3273 - DNA, 20 bp, Artificial Sequence
  Synthetic
atgtgggctgcctagaaagg

SEQ ID NO: 3274 - DNA, 20 bp, Artificial Sequence
  Synthetic
cccagccaaacttgtcaacc

SEQ ID NO: 3275 - DNA, 20 bp, Artificial Sequence
  Synthetic
gaacccaggtagccagagac

SEQ ID NO: 3276 - DNA, 20 bp, Artificial Sequence
  Synthetic
tcctttcaacccgaacggag

SEQ ID NO: 3277 - DNA, 21 bp, Artificial Sequence
  Synthetic
gtctggtgccatggagagtag

SEQ ID NO: 3278 - DNA, 20 bp, Artificial Sequence
  Synthetic
ggtatcaggcgacgtggtat

SEQ ID NO: 3279 - DNA, 20 bp, Artificial Sequence
  Synthetic
cagctcagcctgagtgttga

SEQ ID NO: 3280 - DNA, 19 bp, Artificial Sequence
  Synthetic
ctcgtgggtttgtggttgc

SEQ ID NO: 3281 - DNA, 20 bp, Artificial Sequence
  Synthetic
tgctggacctgtgcccccgc

SEQ ID NO: 3282 - DNA, 50 bp, Artificial Sequence
  Synthetic
attgtcgaggaatgccgaaatgctggacctgtgcccccgcgtggacctac

SEQ ID NO: 3283 - DNA, 50 bp, Artificial Sequence
  Synthetic
attgtcgaggaatgccgaaatgctggatctgtgcccccgcgtggacctac

SEQ ID NO: 3284 - DNA, 50 bp, Artificial Sequence
  Synthetic
attgtcgaggaatgccgaaatgctggatttgtgcccccgcgtggacctac

SEQ ID NO: 3285 - DNA, 50 bp, Artificial Sequence
  Synthetic
attgtcgaggaatgccgaaatgctggacttgtgcccccgcgtggacctac

SEQ ID NO: 3286 - DNA, 50 bp, Artificial Sequence
  Synthetic
attgtcgaggaatgccgaaatgttggatttgtgcccccgcgtggacctac

SEQ ID NO: 3287 - DNA, 50 bp, Artificial Sequence
  Synthetic
attgtcgaggaatgccgaaatgctggaactgtgcccccgcgtggacctac

SEQ ID NO: 3288 - DNA, 50 bp, Artificial Sequence
  Synthetic
attgtcgaggaatgccgaaatgttggacctgtgcccccgcgtggacctac

SEQ ID NO: 3289 - DNA, 50 bp, Artificial Sequence
  Synthetic
attgtcgaggaatgccgaaatgttggatctgtgcccccgcgtggacctac

SEQ ID NO: 3290 - DNA, 50 bp, Artificial Sequence
  Synthetic
attgtcgaggaatgccgaaatgctggagctgtgcccccgcgtggacctac

SEQ ID NO: 3291 - DNA, 50 bp, Artificial Sequence
  Synthetic
attgtcgaggaatgccgaaatgctggacatgtgcccccgcgtggacctac

SEQ ID NO: 3292 - DNA, 50 bp, Artificial Sequence
  Synthetic
attgtcgaggaatgccgaaatgctggatatgtgcccccgcgtggacctac

SEQ ID NO: 3293 - protein, 16 aa, Artificial Sequence
  Synthetic
NDLFASISSRHGRTSR

SEQ ID NO: 3294 - protein, 16 aa, Artificial Sequence
  Synthetic
NDLFASISSKHGRTSR

SEQ ID NO: 3295 - protein, 16 aa, Artificial Sequence
  Synthetic
NDLFASINSRHGRTSR

SEQ ID NO: 3296 - protein, 16 aa, Artificial Sequence
  Synthetic
NDLFASISSSHGRTSR

SEQ ID NO: 3297 - DNA, 12 bp, Artificial Sequence
  Synthetic
tgaagcagcggt

SEQ ID NO: 3298 - DNA, 12 bp, Artificial Sequence
  Synthetic
aggagcagccac

SEQ ID NO: 3299 - DNA, 12 bp, Artificial Sequence
  Synthetic
cggagcagccca

SEQ ID NO: 3300 - DNA, 12 bp, Artificial Sequence
  Synthetic
agaagcagaggc

SEQ ID NO: 3301 - DNA, 12 bp, Artificial Sequence
  Synthetic
acagacttttct

SEQ ID NO: 3302 - DNA, 12 bp, Artificial Sequence
  Synthetic
aagtgcgtcctt

SEQ ID NO: 3303 - DNA, 12 bp, Artificial Sequence
  Synthetic
tggtgcttctgc

SEQ ID NO: 3304 - DNA, 12 bp, Artificial Sequence
  Synthetic
ctgtgcgtcccc

SEQ ID NO: 3305 - DNA, 12 bp, Artificial Sequence
  Synthetic
ctttgctgtcgt

SEQ ID NO: 3306 - DNA, 9 bp, Artificial Sequence
  Synthetic
  misc_feature (1)..(1): n is a, c, g, or t
  misc_feature (3)..(3): n is a, c, g, or t
  misc_feature (5)..(9): n is a, c, g, or t
ncncnnnnn

SEQ ID NO: 3307 - DNA, 10 bp, Artificial Sequence
  Synthetic
gacgcaggtg

SEQ ID NO: 3308 - DNA, 10 bp, Artificial Sequence
  Synthetic
tgcacgtttg

SEQ ID NO: 3309 - DNA, 10 bp, Artificial Sequence
  Synthetic
ggcacgggtg

SEQ ID NO: 3310 - DNA, 10 bp, Artificial Sequence
  Synthetic
gacacaggtg

SEQ ID NO: 3311 - DNA, 10 bp, Artificial Sequence
  Synthetic
gacacggtgg

SEQ ID NO: 3312 - DNA, 10 bp, Artificial Sequence
  Synthetic
ggcacagtgg

SEQ ID NO: 3313 - DNA, 10 bp, Artificial Sequence
  Synthetic
tgcacggagt

SEQ ID NO: 3314 - DNA, 10 bp, Artificial Sequence
  Synthetic
gacacgatta

SEQ ID NO: 3315 - DNA, 10 bp, Artificial Sequence
  Synthetic
agcacagagg

SEQ ID NO: 3316 - DNA, 10 bp, Artificial Sequence
  Synthetic
gacacagggg

SEQ ID NO: 3317 - DNA, 10 bp, Artificial Sequence
  Synthetic
aacactgagt

SEQ ID NO: 3318 - DNA, 10 bp, Artificial Sequence
  Synthetic
agctcgaaga

SEQ ID NO: 3319 - DNA, 10 bp, Artificial Sequence
  Synthetic
tgcacaggga

SEQ ID NO: 3320 - DNA, 10 bp, Artificial Sequence
  Synthetic
tgcactgaag

SEQ ID NO: 3321 - DNA, 10 bp, Artificial Sequence
  Synthetic
gacacggtag

SEQ ID NO: 3322 - DNA, 10 bp, Artificial Sequence
  Synthetic
agcactgaga

SEQ ID NO: 3323 - DNA, 10 bp, Artificial Sequence
  Synthetic
cacacagatg

SEQ ID NO: 3324 - DNA, 10 bp, Artificial Sequence
  Synthetic
gacactgatg

SEQ ID NO: 3325 - DNA, 10 bp, Artificial Sequence
  Synthetic
cacgcggggg

SEQ ID NO: 3326 - DNA, 10 bp, Artificial Sequence
  Synthetic
gacacgaagg

SEQ ID NO: 3327 - DNA, 10 bp, Artificial Sequence
  Synthetic
tacgcgagtg

SEQ ID NO: 3328 - DNA, 10 bp, Artificial Sequence
  Synthetic
ttcactgagg

SEQ ID NO: 3329 - DNA, 10 bp, Artificial Sequence
  Synthetic
ttcactggag

SEQ ID NO: 3330 - DNA, 10 bp, Artificial Sequence
  Synthetic
ttcactgtgg

SEQ ID NO: 3331 - DNA, 10 bp, Artificial Sequence
  Synthetic
ctcacggttg

SEQ ID NO: 3332 - DNA, 10 bp, Artificial Sequence
  Synthetic
atcactgggg

SEQ ID NO: 3333 - DNA, 10 bp, Artificial Sequence
  Synthetic
ctcactgatg

SEQ ID NO: 3334 - DNA, 10 bp, Artificial Sequence
  Synthetic
gtcactgagg

SEQ ID NO: 3335 - DNA, 10 bp, Artificial Sequence
  Synthetic
atcacggaag

SEQ ID NO: 3336 - DNA, 10 bp, Artificial Sequence
  Synthetic
ttcacgtgtg

SEQ ID NO: 3337 - DNA, 9 bp, Artificial Sequence
  Synthetic
  misc_feature (1)..(4): n is a, c, g, or t
  misc_feature (6)..(6): n is a, c, g, or t
  misc_feature (8)..(9): n is a, c, g, or t
nnnnanann

SEQ ID NO: 3338 - DNA, 10 bp, Artificial Sequence
  Synthetic
ggtttacacc

SEQ ID NO: 3339 - DNA, 10 bp, Artificial Sequence
  Synthetic
accttacagg

SEQ ID NO: 3340 - DNA, 10 bp, Artificial Sequence
  Synthetic
ggcctagact

SEQ ID NO: 3341 - DNA, 10 bp, Artificial Sequence
  Synthetic
cctttagagc

SEQ ID NO: 3342 - DNA, 10 bp, Artificial Sequence
  Synthetic
gctgcacagc

SEQ ID NO: 3343 - DNA, 10 bp, Artificial Sequence
  Synthetic
ggtccagagt

SEQ ID NO: 3344 - DNA, 10 bp, Artificial Sequence
  Synthetic
atttcagatg

SEQ ID NO: 3345 - DNA, 10 bp, Artificial Sequence
  Synthetic
gtctcagatg

SEQ ID NO: 3346 - DNA, 10 bp, Artificial Sequence
  Synthetic
tcgtcagagc

SEQ ID NO: 3347 - DNA, 10 bp, Artificial Sequence
  Synthetic
tgcctacagg

SEQ ID NO: 3348 - DNA, 10 bp, Artificial Sequence
  Synthetic
ctggcacatg

SEQ ID NO: 3349 - DNA, 10 bp, Artificial Sequence
  Synthetic
ggttgacatt

SEQ ID NO: 3350 - DNA, 10 bp, Artificial Sequence
  Synthetic
tccccacagc

SEQ ID NO: 3351 - DNA, 10 bp, Artificial Sequence
  Synthetic
ggcctacatg

SEQ ID NO: 3352 - DNA, 10 bp, Artificial Sequence
  Synthetic
gcggcacagt

SEQ ID NO: 3353 - DNA, 10 bp, Artificial Sequence
  Synthetic
cttctagagg

SEQ ID NO: 3354 - DNA, 10 bp, Artificial Sequence
  Synthetic
ggtggacagc

SEQ ID NO: 3355 - DNA, 10 bp, Artificial Sequence
  Synthetic
ccttcacagc

SEQ ID NO: 3356 - DNA, 10 bp, Artificial Sequence
  Synthetic
tgctcacacc

SEQ ID NO: 3357 - DNA, 10 bp, Artificial Sequence
  Synthetic
gcgctagatg

SEQ ID NO: 3358 - DNA, 10 bp, Artificial Sequence
  Synthetic
gggctagagc

SEQ ID NO: 3359 - DNA, 10 bp, Artificial Sequence
  Synthetic
ctgctatagc

SEQ ID NO: 3360 - DNA, 10 bp, Artificial Sequence
  Synthetic
ccgccagacg

SEQ ID NO: 3361 - DNA, 10 bp, Artificial Sequence
  Synthetic
agcgcacacg

SEQ ID NO: 3362 - DNA, 10 bp, Artificial Sequence
  Synthetic
atgtgacacc

SEQ ID NO: 3363 - DNA, 10 bp, Artificial Sequence
  Synthetic
ctcggagatg

SEQ ID NO: 3364 - DNA, 10 bp, Artificial Sequence
  Synthetic
gtggcacatc

SEQ ID NO: 3365 - DNA, 10 bp, Artificial Sequence
  Synthetic
actcgatatt

SEQ ID NO: 3366 - DNA, 10 bp, Artificial Sequence
  Synthetic
cccctatacc

SEQ ID NO: 3367 - DNA, 10 bp, Artificial Sequence
  Synthetic
ttttcatact

SEQ ID NO: 3368 - DNA, 18 bp, Artificial Sequence
  Synthetic
ggccagctcgaagacccg

SEQ ID NO: 3369 - DNA, 18 bp, Artificial Sequence
  Synthetic
ctttgacacaggggattt

SEQ ID NO: 3370 - DNA, 18 bp, Artificial Sequence
  Synthetic
aggtgacacaggtgcgac

SEQ ID NO: 3371 - DNA, 18 bp, Artificial Sequence
  Synthetic
cgttggcacgggtgacgg

SEQ ID NO: 3372 - DNA, 18 bp, Artificial Sequence
  Synthetic
ggcggtcactgaggttct

SEQ ID NO: 3373 - DNA, 18 bp, Artificial Sequence
  Synthetic
ccagttcactgaggctag

SEQ ID NO: 3374 - DNA, 18 bp, Artificial Sequence
  Synthetic
ctggctcactgatgggca

SEQ ID NO: 3375 - DNA, 18 bp, Artificial Sequence
  Synthetic
gcagatcactggggtgga

SEQ ID NO: 3376 - DNA, 18 bp, Artificial Sequence
  Synthetic
tccagacactgatgaatg

SEQ ID NO: 3377 - DNA, 18 bp, Artificial Sequence
  Synthetic
acccaacactgagtggta

SEQ ID NO: 3378 - DNA, 18 bp, Artificial Sequence
  Synthetic
gctgtgcacagggaattc

SEQ ID NO: 3379 - DNA, 18 bp, Artificial Sequence
  Synthetic
caggtgcacgtttgccta

SEQ ID NO: 3380 - DNA, 18 bp, Artificial Sequence
  Synthetic
cccagacacgaagggaga

SEQ ID NO: 3381 - DNA, 18 bp, Artificial Sequence
  Synthetic
cgcaagcacagaggccgg

SEQ ID NO: 3382 - DNA, 18 bp, Artificial Sequence
  Synthetic
ggagctcacggttggttg

SEQ ID NO: 3383 - DNA, 18 bp, Artificial Sequence
  Synthetic
caatgacacggtagatga

SEQ ID NO: 3384 - DNA, 18 bp, Artificial Sequence
  Synthetic
tgaggacacggtggtgga

SEQ ID NO: 3385 - DNA, 18 bp, Artificial Sequence
  Synthetic
agtggacgcaggtgttga

SEQ ID NO: 3386 - DNA, 9 bp, Artificial Sequence
  Synthetic
  misc_feature (1)..(2): n is a, c, g, or t
  misc_feature (4)..(5): n is a, c, g, or t
  misc_feature (7)..(9): n is a, c, g, or t
nncnncnnn

SEQ ID NO: 3387 - DNA, 18 bp, Artificial Sequence
  Synthetic
acgctgactgcggtccct

SEQ ID NO: 3388 - DNA, 18 bp, Artificial Sequence
  Synthetic
aagcggacttcgtggcgg

SEQ ID NO: 3389 - DNA, 18 bp, Artificial Sequence
  Synthetic
ctcaggacttcgagttca

SEQ ID NO: 3390 - DNA, 18 bp, Artificial Sequence
  Synthetic
cccagggcgtcgaaggcg

SEQ ID NO: 3391 - DNA, 18 bp, Artificial Sequence
  Synthetic
tgctgttcaactgatggg

SEQ ID NO: 3392 - DNA, 18 bp, Artificial Sequence
  Synthetic
ctgctatcaacgaactgt

SEQ ID NO: 3393 - DNA, 18 bp, Artificial Sequence
  Synthetic
agggcggcaacggtgtag

SEQ ID NO: 3394 - DNA, 18 bp, Artificial Sequence
  Synthetic
agttctgcagcgtgccac

SEQ ID NO: 3395 - DNA, 18 bp, Artificial Sequence
  Synthetic
agcatgactgcggggcgc

SEQ ID NO: 3396 - DNA, 18 bp, Artificial Sequence
  Synthetic
catctgacggcaagcaac

SEQ ID NO: 3397 - protein, 26 aa, Homo sapiens
RRETYLCYVVKRRDSATSFSLDFGYL

SEQ ID NO: 3398 - protein, 25 aa, Artificial Sequence
  Synthetic
RHETYLCYVVKRRDSATSFSLDFGY

SEQ ID NO: 3399 - protein, 26 aa, Artificial Sequence
  Synthetic
RHETYLCYVVKRRDSATSFSLDFGHL

SEQ ID NO: 3400 - protein, 26 aa, Homo sapiens
RHETYLCYVVKQRNSATSCSLDFGYL

SEQ ID NO: 3401 - protein, 30 aa, Artificial Sequence
  Synthetic
RHKTYLCYEVERLDNGTSVKMDQHRGFLHN

SEQ ID NO: 3402 - protein, 30 aa, Artificial Sequence
  Synthetic
RHKTYLCYEVERLDNGTSVKMDQHRGFLHG

SEQ ID NO: 3403 - protein, 30 aa, Artificial Sequence
  Synthetic
RHQTYLCYEVERLDNGTWVPMDQHWGFLCN

SEQ ID NO: 3404 - protein, 30 aa, Artificial Sequence
  Synthetic
RHQTYLCYEVERLDNGTWVLMDRHMGFLCN

SEQ ID NO: 3405 - protein, 30 aa, Artificial Sequence
  Synthetic
RHETYLCYEVERLHNDTWVLLNQRRGFLCN

SEQ ID NO: 3406 - protein, 25 aa, Rattus norvegicus
RKETCLLYEINWGGRHSIWRHTSQN

SEQ ID NO: 3407 - protein, 25 aa, Artificial Sequence
  Synthetic
RKETCLLYEINWGGRHSVWRHTSQN

SEQ ID NO: 3408 - protein, 25 aa, Artificial Sequence
  Synthetic
RKEACLLYEIKWGMSHNIWRYSGKN

SEQ ID NO: 3409 - protein, 25 aa, Artificial Sequence
  Synthetic
RKETCLLYEIQWGTSRKIWRNSSKN

SEQ ID NO: 3410 - protein, 24 aa, Artificial Sequence
  Synthetic
RCYVLFELKRRGERRACFWGYAVN

SEQ ID NO: 3411 - DNA, 20 bp, Artificial Sequence
  Synthetic
ggtgatatcttggatagcgg

SEQ ID NO: 3412 - DNA, 20 bp, Artificial Sequence
  Synthetic
ggtgatatcttggaagccag

SEQ ID NO: 3413 - DNA, 20 bp, Artificial Sequence
  Synthetic
ggttgttctttgaaaaccgt

SEQ ID NO: 3414 - DNA, 20 bp, Artificial Sequence
  Synthetic
ggtgaggtcctagaagtgca

SEQ ID NO: 3415 - DNA, 20 bp, Artificial Sequence
  Synthetic
ggggatgtccttgaagccgc

SEQ ID NO: 3416 - DNA, 20 bp, Artificial Sequence
  Synthetic
ggagatgtcctggaatcgct

SEQ ID NO: 3417 - DNA, 20 bp, Artificial Sequence
  Synthetic
gccttaacgggcactctgtc

SEQ ID NO: 3418 - DNA, 20 bp, Artificial Sequence
  Synthetic
ggagatatcttggaaacatc

SEQ ID NO: 3419 - DNA, 20 bp, Artificial Sequence
  Synthetic
ggtgatgtccttgagccgag

SEQ ID NO: 3420 - DNA, 29 bp, Artificial Sequence
  Synthetic
gagtcctagagtgttatctttaggcacga

SEQ ID NO: 3421 - DNA, 20 bp, Artificial Sequence
  Synthetic
taggcacgatacaggtacat

SEQ ID NO: 3422 - DNA, 50 bp, Artificial Sequence
  Synthetic
gagtcctagagtgttatctttaggcacgatacaggtacatgaatccgctc

SEQ ID NO: 3423 - DNA, 50 bp, Artificial Sequence
  Synthetic
gagtcctagagtgttatctttaggcatgatacaggtacatgaatccgctc

SEQ ID NO: 3424 - DNA, 50 bp, Artificial Sequence
  Synthetic
gagtcctagagtgttatttttaggcatgatacaggtacatgaatccgctc

SEQ ID NO: 3425 - DNA, 50 bp, Artificial Sequence
  Synthetic
gagtcctagagtgttatctttaggtatgatacaggtacatgaatccgctc

SEQ ID NO: 3426 - DNA, 50 bp, Artificial Sequence
  Synthetic
gagtcctagagtgttatttttaggtatgatacaggtacatgaatccgctc

SEQ ID NO: 3427 - DNA, 50 bp, Artificial Sequence
  Synthetic
gagtcctagagtgttatttttaggcacgatacaggtacatgaatccgctc

SEQ ID NO: 3428 - DNA, 50 bp, Artificial Sequence
  Synthetic
gagtcctagagtgttatctttaggtacgatacaggtacatgaatccgctc

SEQ ID NO: 3429 - DNA, 50 bp, Artificial Sequence
  Synthetic
gagtcctagagtgttatttttaggtacgatacaggtacatgaatccgctc

SEQ ID NO: 3430 - DNA, 50 bp, Artificial Sequence
  Synthetic
gagtcctagagtgttatctttaggcaggatacaggtacatgaatccgctc

SEQ ID NO: 3431 - DNA, 50 bp, Artificial Sequence
  Synthetic
gagtcctagagtgttatgtttaggcacgatacaggtacatgaatccgctc

SEQ ID NO: 3432 - DNA, 50 bp, Artificial Sequence
  Synthetic
gagtcctagagtgttatgtttaggcatgatacaggtacatgaatccgctc

SEQ ID NO: 3433 - DNA, 20 bp, Artificial Sequence
  Synthetic
aggcacgatacaggtacatg

SEQ ID NO: 3434 - DNA, 20 bp, Artificial Sequence
  Synthetic
ggcacgatacaggtacatga

SEQ ID NO: 3435 - DNA, 20 bp, Artificial Sequence
  Synthetic
cacgatacaggtacatgaat

SEQ ID NO: 3436 - DNA, 20 bp, Artificial Sequence
  Synthetic
acgatacaggtacatgaatc

SEQ ID NO: 3437 - DNA, 28 bp, Artificial Sequence
  Synthetic
gagtcctagagtgttaatgaatccgctc

SEQ ID NO: 3438 - DNA, 50 bp, Artificial Sequence
  Synthetic
tcctagagtgttatctttaggcacgatacaggtacatgaatccgctcatc

SEQ ID NO: 3439 - DNA, 50 bp, Artificial Sequence
  Synthetic
tcctagagtgttatctttaggcatgatacaggtacatgaatccgctcatc

SEQ ID NO: 3440 - DNA, 50 bp, Artificial Sequence
  Synthetic
tcctagagtgttatctttaggcacgatataggtacatgaatccgctcatc

SEQ ID NO: 3441 - DNA, 50 bp, Artificial Sequence
  Synthetic
tcctagagtgttatctttaggcatgatataggtacatgaatccgctcatc

SEQ ID NO: 3442 - DNA, 50 bp, Artificial Sequence
  Synthetic
tcctagagtgttatttttaggcacgatacaggtacatgaatccgctcatc

SEQ ID NO: 3443 - DNA, 50 bp, Artificial Sequence
  Synthetic
tcctagagtgttatctttaggcaggatacaggtacatgaatccgctcatc

SEQ ID NO: 3444 - DNA, 50 bp, Artificial Sequence
  Synthetic
tcctagagtgttatctttaggcaagatacaggtacatgaatccgctcatc

SEQ ID NO: 3445 - DNA, 50 bp, Artificial Sequence
  Synthetic
tcctagagtgttatctttaggcacgatagaggtacatgaatccgctcatc

SEQ ID NO: 3446 - DNA, 50 bp, Artificial Sequence
  Synthetic
tcctagagtgttatctttaggcacgatacaggtatatgaatccgctcatc

SEQ ID NO: 3447 - DNA, 50 bp, Artificial Sequence
  Synthetic
tcctagagtgttatatttaggcacgatacaggtacatgaatccgctcatc

SEQ ID NO: 3448 - DNA, 50 bp, Artificial Sequence
  Synthetic
tcctagagtgttatctttaggcatgatacaggtatatgaatccgctcatc

SEQ ID NO: 3449 - DNA, 28 bp, Artificial Sequence
  Synthetic
gagtccagagtgttatctttaggcacga

SEQ ID NO: 3450 - DNA, 50 bp, Artificial Sequence
  Synthetic
tcctagagtgttatctttaggcacgatataggtatatgaatccgctcatc

SEQ ID NO: 3451 - DNA, 50 bp, Artificial Sequence
  Synthetic
tcctagagtgttatctttaggcatgatataggtatatgaatccgctcatc

SEQ ID NO: 3452 - DNA, 50 bp, Artificial Sequence
  Synthetic
tcctagagtgttatctttaggcacgataaaggtacatgaatccgctcatc

SEQ ID NO: 3453 - DNA, 31 bp, Artificial Sequence
  Synthetic
gctcagggcggcaacggtgtagcggcggggg

SEQ ID NO: 3454 - DNA, 31 bp, Artificial Sequence
  Synthetic
gctcagggcggcaatggtgtagcggcggggg

SEQ ID NO: 3455 - DNA, 25 bp, Artificial Sequence
  Synthetic
gttacttacgaacgtacgagcgtta

SEQ ID NO: 3456 - DNA, 15 bp, Artificial Sequence
  Synthetic
atattgagcgtacca

SEQ ID NO: 3457 - DNA, 15 bp, Artificial Sequence
  Synthetic
atattgggcgtacca

SEQ ID NO: 3458 - DNA, 15 bp, Artificial Sequence
  Synthetic
atgttgagcgtacca

SEQ ID NO: 3459 - DNA, 15 bp, Artificial Sequence
  Synthetic
atattgagcgtgcca

SEQ ID NO: 3460 - DNA, 15 bp, Artificial Sequence
  Synthetic
atattgggcgtgcca

SEQ ID NO: 3461 - DNA, 15 bp, Artificial Sequence
  Synthetic
atgttgggcgtacca

SEQ ID NO: 3462 - DNA, 15 bp, Artificial Sequence
  Synthetic
atgttgggcgtgcca

SEQ ID NO: 3463 - DNA, 15 bp, Artificial Sequence
  Synthetic
atgttgagcgtgcca

SEQ ID NO: 3464 - DNA, 15 bp, Artificial Sequence
  Synthetic
gtattgagcgtacca

SEQ ID NO: 3465 - DNA, 15 bp, Artificial Sequence
  Synthetic
atattgagcgtaccg

SEQ ID NO: 3466 - DNA, 14 bp, Artificial Sequence
  Synthetic
ttctaggctagcgc

SEQ ID NO: 3467 - DNA, 14 bp, Artificial Sequence
  Synthetic
ttttaggctagcgc

SEQ ID NO: 3468 - DNA, 14 bp, Artificial Sequence
  Synthetic
ttgtaggctagcgc

SEQ ID NO: 3469 - DNA, 14 bp, Artificial Sequence
  Synthetic
ttttaggttagcgc

SEQ ID NO: 3470 - DNA, 14 bp, Artificial Sequence
  Synthetic
ttctagggtagcgc

SEQ ID NO: 3471 - DNA, 14 bp, Artificial Sequence
  Synthetic
ttttaggttagtgc

SEQ ID NO: 3472 - DNA, 14 bp, Artificial Sequence
  Synthetic
ttctaggttagcgc

SEQ ID NO: 3473 - DNA, 14 bp, Artificial Sequence
  Synthetic
ttataggctagcgc

SEQ ID NO: 3474 - DNA, 14 bp, Artificial Sequence
  Synthetic
ttttagggtagcgc

SEQ ID NO: 3475 - DNA, 14 bp, Artificial Sequence
  Synthetic
ttctaggatagcgc

SEQ ID NO: 3476 - protein, 15 aa, Artificial Sequence
  Synthetic
LECYLARYRYMNPLI

SEQ ID NO: 3477 - protein, 14 aa, Artificial Sequence
  Synthetic
LECYLAYRYMNPLI

SEQ ID NO: 3478 - protein, 14 aa, Artificial Sequence
  Synthetic
LECYLARRYMNPLI

SEQ ID NO: 3479 - protein, 15 aa, Artificial Sequence
  Synthetic
LECYFARYRYMNPLI

SEQ ID NO: 3480 - DNA, 50 bp, Artificial Sequence
  Synthetic
agtcctagagtgttatctttaggcacgatacaggtacatgaatccgctca

SEQ ID NO: 3481 - DNA, 50 bp, Artificial Sequence
  Synthetic
agtcctagagtgttatctttaggcatgatacaggtacatgaatccgctca

SEQ ID NO: 3482 - DNA, 50 bp, Artificial Sequence
  Synthetic
agtcctagagtgttatctttaggtatgatacaggtacatgaatccgctca

SEQ ID NO: 3483 - DNA, 50 bp, Artificial Sequence
  Synthetic
agtcctagagtgttatctttaggcaggatacaggtacatgaatccgctca

SEQ ID NO: 3484 - DNA, 50 bp, Artificial Sequence
  Synthetic
agtcctagagtgttatctttaggtacgatacaggtacatgaatccgctca

SEQ ID NO: 3485 - DNA, 50 bp, Artificial Sequence
  Synthetic
agtcctagagtgttatctttaggtatgatataggtacatgaatccgctca

SEQ ID NO: 3486 - DNA, 50 bp, Artificial Sequence
  Synthetic
agtcctagagtgttatttttaggcatgatacaggtacatgaatccgctca

SEQ ID NO: 3487 - DNA, 50 bp, Artificial Sequence
  Synthetic
agtcctagagtgttatctttaggcaagatacaggtacatgaatccgctca

SEQ ID NO: 3488 - DNA, 50 bp, Artificial Sequence
  Synthetic
agtcctagagtgttatttttaggtatgatacaggtacatgaatccgctca

SEQ ID NO: 3489 - DNA, 50 bp, Artificial Sequence
  Synthetic
agtcctagagtgttatctttaggcatgatataggtacatgaatccgctca

SEQ ID NO: 3490 - DNA, 50 bp, Artificial Sequence
  Synthetic
agtcctagagtgttatttttaggcacgatacaggtacatgaatccgctca

SEQ ID NO: 3491 - protein, 16 aa, Artificial Sequence
  Synthetic
SPRVLSLGTIQVHESA

SEQ ID NO: 3492 - protein, 16 aa, Artificial Sequence
  Synthetic
SPRVLSLGMIQVHESA

SEQ ID NO: 3493 - protein, 17 aa, Artificial Sequence
  Synthetic
SPRVLSLGRIQVHESSA

SEQ ID NO: 3494 - protein, 15 aa, Artificial Sequence
  Synthetic
SPRVLSLGMIVHESA

SEQ ID NO: 3495 - protein, 16 aa, Artificial Sequence
  Synthetic
SPRVLFLGMIQVHESA

SEQ ID NO: 3496 - protein, 16 aa, Artificial Sequence
  Synthetic
SPRVLSLGKIQVHESA

SEQ ID NO: 3497 - DNA, 11 bp, Artificial Sequence
  Synthetic
tcctagagtgt

SEQ ID NO: 3498 - protein, 15 aa, Artificial Sequence
  Synthetic
LECYLAGYRYMNPLI

SEQ ID NO: 3499 - protein, 14 aa, Artificial Sequence
  Synthetic
LECYLARYRMNPLI

SEQ ID NO: 3500 - protein, 14 aa, Artificial Sequence
  Synthetic
LECYLVYRYMNPLI

SEQ ID NO: 3501 - protein, 13 aa, Artificial Sequence
  Synthetic
LECYLARYMNPLI

SEQ ID NO: 3502 - protein, 15 aa, Artificial Sequence
  Synthetic
LECYVARYRYMNPLI

SEQ ID NO: 3503 - protein, 15 aa, Artificial Sequence
  Synthetic
LECYIARYRYMNPLI

SEQ ID NO: 3504 - DNA, 18 bp, Artificial Sequence
  Synthetic
tcctagagtgttatcttt
